(19) United States
(12) Patent Application Publication
(10) Pub. No.: US 2014/0011206 A1
(43) Pub. Date: Jan. 9, 2014

(54) DETERMINATION OF OOCYTE QUALITY

(71) Applicants: Keith E. Latham, Okemos, MI (US); Young S. Lee, Frederick, MD (US); Catherine A. VandeVoort, Davis, CA (US)

(72) Inventors: Keith E. Latham, Okemos, MI (US); Young S. Lee, Frederick, MD (US); Catherine A. VandeVoort, Davis, CA (US)

(73) Assignees: THE REGENTS OF THE UNIVERSITY OF CALIFORNIA, Oakland, CA (US); TEMPLE UNIVERSITY - OF THE COMMONWEALTH SYSTEM OF HIGHER EDUCATION, Philadelphia, PA (US)

(21) Appl. No.: 13/984,244

(22) PCT Filed: Feb. 8, 2012
(86) PCT No.: PCT/US12/24290

§ 371 Date: Sep. 24, 2013

Related U.S. Application Data
(60) Provisional application No. 61/441,065, filed on Feb. 9, 2011.

(51) Int. Cl. C12Q 1/68

(52) U.S. Cl. CPC C12Q 1/6881
USPC 435/6.12; 435/7.1; 435/7.92

(57) ABSTRACT

A method for evaluating the quality of mammalian oocytes comprises determining the expression level of one or more of the genes ACPP, AQP11, CCDC126, CLU, CYP11 A1, CYP19A1, EGR3, FN1, FOSL2, GMNN, HRAS, HSD3B2, HS-D17B1, HSD11B2, HSDL1, IGF1, IGFBP4, IGFBP5, IRS1, KCNK3, KLF6, NEK6, SMAD7 or STC1 in a test sample derived from a cumulus cell or granulosa cell associated with the oocyte, and comparing the expression level of said at least one marker gene expression in the sample with the expression level in a control. Differential expression of the gene between the sample and the control is indicative of the quality of the oocyte.

### CROSS-REFERENCE TO RELATED APPLICATION

[0001] The benefit of the filing date of U.S. Provisional Patent Application No. 61/441,065, filed Feb. 9, 2011, is hereby claimed. The entire disclosure of the aforesaid application is incorporated herein by reference.

### REFERENCE TO GOVERNMENT GRANT

[0002] The invention was supported in part by National Institutes of Health, National Center for Research Resources grants RR15253, RR00169 and RR025880. The government has certain rights in the invention.

### SEQUENCE LISTING

[0003] The instant application contains a Sequence Listing which has been submitted in ASCII format via EFS-Web and is hereby incorporated by reference in its entirety. Said ASCII copy, created on Jan. 27, 2012, is named 35926408.txt and is 931,059 bytes in size.

### FIELD OF THE INVENTION

[0004] The invention relates to a noninvasive method for assessing oocyte quality.

### BACKGROUND OF THE INVENTION

[0005] Life begins in the oocyte. The oocyte accumulates a remarkable and complex macromolecular reservoir that mediates and controls the initial development of each new individual, while at the same time eliminating a range of molecules that promote gametogenesis but would otherwise impede early embryogenesis. Failure to complete these transitions appropriately yields an oocyte with limited developmental potential, unable to undergo fertilization or activation, or unable to sustain embryogenesis after fertilization and activation.

[0006] Only about 25% of spontaneous conceptions in humans develop to term. With assisted reproduction this number declines to 10-15%. The low percentage of successful pregnancies per fertilized oocyte reflects a variety of factors, of which heterogeneity amongst oocytes in the ability to support embryogenesis is a major element. This heterogeneity in oocyte quality reflects the unique and complex nature of the developing oocyte, a process that occurs in an isolated microenvironment (the follicle) in close coordination and cooperation with somatic cells that regulate oogenesis.

[0007] The oocyte develops in close coordination with the somatic companion cells, particularly the cumulus oophorous cells, which maintain direct contact with the oocyte via trans-zonal processes and gap junctions until just before ovulation. Through its secretion of several exogenous factors, the oocyte exerts a commanding role in the overall development of the follicle and the overall differentiation of the cumulus cells. In return, the cumulus cells play a key supportive role by providing to the oocyte a range of extracellular and intracellular molecules that sustain oocyte growth, regulate meiotic progression, and serve as essential metabolic precursors, among other functions.

[0008] This intimate relationship between the oocyte and attached cumulus cells causes the two cell types to develop and differentiate progressively and in concert with one another. Importantly, the phenotypic state (e.g., gene expression program) of each cell type depends on that of the other; this situation enables the oocyte to instruct the cumulus cells to provide what it requires at any given time, and as a result, the specific cellular state of the cumulus cell is related to the specific differentiated state of the oocyte. Due to this critical and dynamic relationship, disruption in the development of either cell component can compromise oocyte quality. Because cumulus cell phenotype varies with oocyte developmental state, so too must cumulus cell quality vary between follicles. Hence, the cumulus cell phenotypic state for each follicle will be indicative of the quality of each oocyte. Accordingly, clues to the molecular determinants of oocyte quality may be sought by examination of the cumulus cell phenotype.

[0009] Meeting this objective will be advantageous as a non-invasive means of evaluating oocyte quality clinically, and moreover could illuminate the mechanisms of successful follicle development and oogenesis. A number of recent studies have aimed to identify cumulus cell markers or follicular markers of oocyte quality. (Wunder, et al. (2005). J Assist Reprod Genet 22(6): 257-64 2005; Zhang, et al. (2005) Fertil Steril 83 Suppl 1:1169-79; Liu, et al. (2006) J Assist Reprod Genet 23(4):191-8.; Paffoni, et al. (2006) J Soc Gynecol Investig 13(3):226-31; Cillo, et al. (2007) Reproduction 134(5):645-50; Wu, et al. (2007) Hum Reprod 22(6):1526-31; Yanaihara, et al. (2007) Fertil Steril 87(2):279-82; Assidi, et al. (2008) Biol Reprod 79(2):209-22; Bettegowda, et al. (2008) Biol Reprod 79(2):301-9; Fujino, et al. (2008) Fertil Steril 89(1):60-5; Hamel, et al. (2008) Hum Reprod 23(5):1118-27; Ledee, et al. (2008) Hum Reprod 23(9):2001-9; Li, et al. (2008) Mol Hum Reprod 14(12):673-8; Anderson, et al. (2009) Reproduction 138(4):629-37; Caixeta, et al. (2009) Reprod Fertil Dev 21(5):655-64; Ireland, et al. (2009) Biol Reprod 80(5):954-64; Lee, et al. (2009) Endocrinology 150(5):2463-71.) However, these markers have not proven to be of high predictive value, and neither have they yielded significant new insight into the underlying molecular processes that drive productive oocyte-cumulus cell interactions and ultimately high oocyte quality.

[0010] In vitro maturation (IVM) comprises giving oocytes the initial stimulus to mature in an in vitro environment. IVM has not been very successful in either nonhuman primates or the human. Only a few reports have been published for IVM of human oocytes from non-stimulated cycles in women, leading to term development (Cha et al., (1991) Fertil. Steril., 55:109-113; Trounson et al., (1994) Fertil. Steril., 62::353-362; Barnes et al., (1995) Hum. Reprod., 10:3243-3247; Russell et al., (1997) Fertil. Steril., 67:616-620; Yoon et al., (2001) J Assist Reprod Genet., 18(6):325-9). Oocyte viability and embryonic development after IVM is substantially lower than with in vivo maturation (VVM). Often, oocytes are retrieved from patients either after failure to mature subsequent to in vivo stimulation or after a low-level dose of human chorionic gonadotropin to initiate the process in vivo (e.g., Chian et al., (2009) Fertil Steril. 91(2):372-6; Yang et al., (2010) Reprod Biomed Online 20(5):656-9). It has been shown that mRNA content with IVM after hCG stimulation in vivo and failure to mature (i.e. oocyte incompetent to mature in vivo were stimulated to mature in vitro) is profoundly altered compared to in vivo matured oocytes (i.e., oocytes that were competent to mature in vivo) (Jones et al., (2008) Hum Reprod. (5):1138-44).

[0011] In the rhesus monkey, in vivo oocyte maturation (VVM) yields oocytes of high quality that can support efficient development, whereas in vitro maturation (IVM) consistently yields oocytes of very limited developmental potential (Lee, et al. (2008) Physiol Genomics 35(2):145-58; Nyholt de Prada, et al. (2009) Am J Physiol Endocrinol Metab 296(5):E1049-58). Rhesus monkey oocytes retrieved after 7 days of in vivo follicle stimulating hormone (FSH) stimulation and then signaled to mature in vitro are able to be fertilized and undergo cleavage and in vitro development to blastocyst stage, but long-term development is very limited (Schramm et al., (2003) Hum Reprod., 18(4):826-33)). Modified culture conditions can increase this success (Schramm et al., (2003) supra; Curnow et al., (2010), 25(10): 2465-2474) and affect gene expression in the oocyte (Nyholt de Prada et al., (2010) Mol Reprod Dev. 77(4):353-62), but improvements can be limited to attaining intermediate stages, and successful development after IVM remains limited. Studies indicate that embryos derived from IVM oocytes in the monkey are deficient in the timely onset of embryonic gene transcription (Schramm et al., (2003), supra). Comparisons of mRNA expression profiles between in vivo matured rhesus monkey oocytes and in vitro matured oocytes (no prior hCG stimulation) revealed highly similar expression profiles (Lee, et al. (2008) Physiol Genomics 35(2):145-58).

[0012] Collectively, these studies illustrate that oocytes matured by IVM are of reduced quality compared to in vivo matured oocytes.

### SUMMARY OF THE INVENTION

[0013] A method for evaluating the quality of a mammalian oocyte comprises: (a) determining the level of expression of at least one marker gene of a set of maker genes comprising ACPP, AQP11, CCDC126, CLU, CYP11A1, CYP19A1, EGR3, FN1, FOSL2, GMNN, HRAS, HSD3B2, HSD17B1, HSD11B2, HSDL1, IGF1, IGFBP4, IGFBP5, IRS1, KCNK3, KLF6, NEK6, SMAD7 and STC1 in a test sample derived from a cumulus cell or granulosa cell associated with the oocyte, after maturation of the oocyte; and (b) comparing the expression level of said at least one marker gene expression in the sample with the expression level in a control, wherein detecting differential expression of the maker gene between the sample and the control is indicative of the quality of the oocyte.

[0014] In embodiments, the control comprises a sample derived from a cumulus cell or a granulosa cell associated with a mammalian oocyte of known quality. In some such embodiments, the control comprises a sample derived from a cumulus cell or a granulosa cell associated with an in vitro matured mammalian oocyte. In other embodiments, the control comprises a sample is derived from a cumulus cell or a granulosa cell associated with an in vivo mammalian matured oocyte.

[0015] A method for selecting a mammalian oocyte from a plurality of candidate oocytes for preservation or implantation comprises: (a) determining the level of expression of at least one marker gene of a set of marker genes comprising ACPP, AQP11, CCDC126, CLU, CYP11A1, CYP19A1, EGR3, FN1, FOSL2, GMNN, HRAS, HSD3B2, HSD17B1, HSD11B2, HSDL1, IGF1, IGFBP4, IGFBP5, IRS1, KCNK3, KLF6, NEK6, SMAD7 and STC 1 in each of a plurality of samples, each sample being derived from a cumulus cell or a granulosa cell associated with a candidate oocyte; (b) comparing the expression level of said at least one marker gene in the plurality of samples; and (c) selecting for preservation or implantation a candidate oocyte associated with a sample having a level of marker gene expression compared to the level of marker gene expression in other samples, which level of marker gene expression of said selected candidate is indicative of a higher probability of oocyte quality than at least one other oocyte in the plurality of candidate oocytes.

[0016] In certain embodiments the level of expression of at least three marker genes is determined. The at least three marker genes may comprise in some embodiments, NEK6, AQP11 and IGF1. In one embodiment, the probability of a mammalian oocyte of high quality (P) is given by the equation:

P=e^{5.608+0.645x+0.100y-2.17z/}1+e^{.}e^{5.608+0.645x+0.100y-2.17z}

wherein:

[0017] x is the expression level of NEK6 relative to a control;

[0018] y is the expression level of AQP11 relative to a control; and

[0019] z is the expression level of IGF1 relative to a control.

[0020] In other embodiments, the expression level of at least ten marker genes is determined.

[0021] In some embodiments, marker gene expression level is determined by determining the level of mRNA produced from marker genes. For example, the level of mRNA may be determined by reverse transcription polymerase chain reaction. In other embodiments, the marker gene expression level is determined by determining the level of polypeptide produced from marker genes.

[0022] In some embodiments, the mammalian oocyte is an oocyte of a domesticated mammal, including but not limited to bovines, goats and pigs. In other embodiments, the mammalian oocyte is an oocyte of a human being.

[0023] A kit for evaluating mammalian oocyte quality comprises: a set of reagents that specifically detects the expression levels of one or more marker genes of a mammal comprising ACPP, AQP11, CCDC126, CLU, CYP11A1, CYP19A1, EGR3, FN1, FOSL2, GMNN, HRAS, HSD3B2, HSD17B1, HSD11B2, HSDL1, IGF1, IGFBP4, IGFBP5, IRS1, KCNK3, KLF6, NEK6, SMAD7 or STC1; and instructions for using said kit for evaluating oocyte quality.

[0024] In some embodiments, the set of reagents of the kit detects mRNA expressed from one or more marker genes. In some such embodiments, set of reagents comprises nucleic acid probes complementary to mRNA expressed from one or more marker genes. In some embodiments, the nucleic acid probes complementary to mRNA are immobilized on a substrate surface.

[0025] In some embodiments, the set of reagents of the kit detects polypeptides encoded by one or more marker genes. In some embodiments, the set of reagents comprises antibodies or aptamers that specifically bind to the polypeptides encoded by one or more marker genes.

[0026] In certain embodiments of the methods and kits of the invention for assessment of bovine oocyte quality, the level of at least one of the following mRNAs is determined:

[0027] the NEK6 mRNA having Genbank Accession Number NM_{—}001098988.1;

[0028] the AQP 11 mRNA having Genbank Accession Number NM_{—}001110069.1;

[0029] the CCDC126 mRNA having Genbank Accession Number NM_{—}001082472.2;

[0030] the KLF6 mRNA having Genbank Accession Number NM_{—}001035271.2;

[0031] the ACPP mRNA having Genbank Accession Number NM_{—}001098866.1;

[0032] the IGFBP4 mRNA having Genbank Accession Number NM_{—}174557.3;

[0033] the IGF1 mRNA having Genbank Accession Number NM_{—}001077828.1;

[0034] the IRS1 mRNA having Genbank Accession Number XM_{—}581382.3;

[0035] the IRS1 mRNA having Genbank Accession Number XM_{—}002685642.1;

[0036] the FOSL2 mRNA having Genbank Accession Number NM_{—}001192950.1;

[0037] the FOSL2 mRNA having Genbank Accession Number XM_{—}002691451.1;

[0038] the HRAS mRNA having Genbank Accession Number XM_{—}590626.2;

[0039] the HRAS mRNA having Genbank Accession Number XM_{—}874655.1;

[0040] the HRAS mRNA having Genbank Accession Number XM_{—}874570.1;

[0041] the CLU mRNA having Genbank Accession Number NM_{—}173902.2;

[0042] the HSD17B1 mRNA having Genbank Accession Number XM_{—}001253407.1;

[0043] the HSD17B1 mRNA having Genbank Accession Number NM_{—}001102365.1;

[0044] the HSDL1 mRNA having Genbank Accession Number NM_{—}001098871.1;

[0045] the HSD11B2 mRNA having Genbank Accession Number NM_{—}174642.1;

[0046] the STC1 mRNA having Genbank Accession Number NM_{—}176669.3;

[0047] the CYP11A1 mRNA having Genbank Accession Number NM_{—}176644.2;

[0048] the GMNN mRNA having Genbank Accession Number NM_{—}001025337.1;

[0049] the CYP19A1 mRNA having Genbank Accession Number NM_{—}174305.1;

[0050] the IGFBP5 mRNA having Genbank Accession Number NM_{—}001105327.1;

[0051] the KCNK3 mRNA having Genbank Accession Number XM_{—}597401.5;

[0052] the KCNK3 mRNA having Genbank Accession Number XM_{—}002691458.1;

[0053] the SMAD7 mRNA having Genbank Accession Number NM_{—}001192865.1;

[0054] the SMAD7 mRNA having Genbank Accession Number XM_{—}002697763.1;

[0055] the SMAD7 mRNA having Genbank Accession Number XM_{—}616030.3;

[0056] the EGR3 mRNA having Genbank Accession Number XM_{—}604596.5;

[0057] the EGR3 mRNA having Genbank Accession Number XM_{—}002689773.1; and

[0058] the FN1 mRNA having Genbank Accession Number NM_{—}001163778.1.

[0059] In certain other embodiments of the methods and kits of the invention for assessment of bovine oocyte quality, the level of at least one of the following polypeptides is determined:

[0060] the NEK6 polypeptide having Genbank Accession Number NP_{—}001092458.1;

[0061] the AQP11 polypeptide having Genbank Accession Number NP_{—}001103539.1;

[0062] the CCDC126 polypeptide having Genbank Accession Number NP_{—}001075941.1;

[0063] the KLF6 polypeptide having Genbank Accession Number NP_{—}001030348.2;

[0064] the ACPP polypeptide having Genbank Accession Number NP_{—}001092336.1;

[0065] the IGFBP4 polypeptide having Genbank Accession Number NP_{—}776982.1;

[0066] the IGF1 polypeptide having Genbank Accession Number NP_{—}001071296.1;

[0067] the IRS1 polypeptide having Genbank Accession Number XP_{—}581382.2;

[0068] the IRS1 polypeptide having Genbank Accession Number XP_{—}002685688.1;

[0069] the FOSL2 polypeptide having Genbank Accession Number NP_{—}001179879.1;

[0070] the FOSL2 polypeptide having Genbank Accession Number XP_{—}002691497.1;

[0071] the HRAS polypeptide having Genbank Accession Number XP_{—}590626.2;

[0072] the HRAS polypeptide having Genbank Accession Number XP_{—}879748.1;

[0073] the HRAS polypeptide having Genbank Accession Number XP_{—}879663.1;

[0074] the CLU polypeptide having Genbank Accession Number NP_{—}776327.1;

[0075] the HSD17B1 polypeptide having Genbank Accession Number XP_{—}001253408.1;

[0076] the HSD17B1 polypeptide having Genbank Accession Number NP_{—}001095835.1;

[0077] the HSDL1 polypeptide having Genbank Accession Number NP_{—}001092341.1;

[0078] the HSD11B2 polypeptide having Genbank Accession Number NP_{—}777067.1;

[0079] the STC1 polypeptide having Genbank Accession Number NP_{—}788842.2;

[0080] the CYP11A1 polypeptide having Genbank Accession Number NP_{—}788817.1;

[0081] the GMNN polypeptide having Genbank Accession Number NP_{—}001020508.1;

[0082] the CYP19A1 polypeptide having Genbank Accession Number NP_{—}776730.1;

[0083] the IGFBP5 polypeptide having Genbank Accession Number NP_{—}001098797.1;

[0084] the KCNK3 polypeptide having Genbank Accession Number XP_{—}597401.4;

[0085] the KCNK3 polypeptide having Genbank Accession Number XP_{—}002691504.1;

[0086] the SMAD7 polypeptide having Genbank Accession Number NP_{—}001179794.1;

[0087] the SMAD7 polypeptide having Genbank Accession Number XP_{—}002697809.1;

[0088] the SMAD7 polypeptide having Genbank Accession Number XP_{—}616030.3;

[0089] the EGR3 polypeptide having Genbank Accession Number XP_{—}604596.4;

[0090] the EGR3 polypeptide having Genbank Accession Number XP_{—}002689819.1; and

[0091] the FN1 polypeptide having Genbank Accession Number NP 001157250.1;

[0092] In certain embodiments of the methods and kits of the invention for assessment of human oocyte quality, the level of at least one of the following mRNAs is determined:

[0093] the NEK6 mRNA having Genbank Accession Number NM_{—}001145001.2;

[0094] the NEK6 mRNA having Genbank Accession Number NM_{—}001166167.1;

[0095] the NEK6 mRNA having Genbank Accession Number NM_{—}001166168.1;

[0096] the NEK6 mRNA having Genbank Accession Number NM_{—}001166169.1;

[0097] the NEK6 mRNA having Genbank Accession Number NM_{—}001166170.1;

[0098] the NEK6 mRNA having Genbank Accession Number NM_{—}001166171.1;

[0099] the NEK6 mRNA having Genbank Accession Number NM_{—}014397.5;

[0100] the AQP11 mRNA having Genbank Accession Number NM_{—}173039.2;

[0101] the CCDC126 mRNA having Genbank Accession Number NM_{—}138771.3;

[0102] the KLF6 mRNA having Genbank Accession Number NM_{—}001160124.1;

[0103] the KLF6 mRNA having Genbank Accession Number NM_{—}001160125.1;

[0104] the KLF6 mRNA having Genbank Accession Number NM_{—}001300.5;

[0105] the ACPP mRNA having Genbank Accession Number NM_{—}001134194.1;

[0106] the ACPP mRNA having Genbank Accession Number NM_{—}001099.4;

[0107] the IGFBP4 mRNA having Genbank Accession Number NM_{—}001552.2;

[0108] the IGF1 mRNA having Genbank Accession Number NM_{—}000618.3;

[0109] the IGF1 mRNA having Genbank Accession Number NM_{—}001111283.1;

[0110] the IGF1 mRNA having Genbank Accession Number NM_{—}001111284.1;

[0111] the IGF1 mRNA having Genbank Accession Number NM_{—}001111285.1;

[0112] the IRS1 mRNA having Genbank Accession Number NM_{—}005544.2;

[0113] the FOSL2 mRNA having Genbank Accession Number NM_{—}005253.3;

[0114] the HRAS mRNA having Genbank Accession Number NM_{—}001130442.1;

[0115] the HRAS mRNA having Genbank Accession Number NM_{—}005343.2;

[0116] the HRAS mRNA having Genbank Accession Number NM_{—}176795.3;

[0117] the CLU mRNA having Genbank Accession Number NM_{—}001171138.1;

[0118] the CLU mRNA having Genbank Accession Number NM_{—}001831.2;

[0119] the CLU mRNA having Genbank Accession Number NM_{—}203339.1;

[0120] the HSD17B1 mRNA having Genbank Accession Number NM_{—}000413.2;

[0121] the HSDL1 mRNA having Genbank Accession Number NM_{—}001146051.1;

[0122] the HSDL1 mRNA having Genbank Accession Number NM_{—}031463.4;

[0123] the HSD11B2 mRNA having Genbank Accession Number NM_{—}000196.3;

[0124] the STC1 mRNA having Genbank Accession Number NM_{—}003155.2;

[0125] the CYP11A1 mRNA having Genbank Accession Number NM_{—}000781.2;

[0126] the CYP11A1 mRNA having Genbank Accession Number NM_{—}001099773.1;

[0127] the GMNN mRNA having Genbank Accession Number NM_{—}015895.3;

[0128] the HSD3B2 mRNA having Genbank Accession Number NM_{—}000198.3;

[0129] the HSD3B2 mRNA having Genbank Accession Number NM_{—}001166120.1;

[0130] the CYP19A1 mRNA having Genbank Accession Number NM_{—}000103.3;

[0131] the CYP19A1 mRNA having Genbank Accession Number NM_{—}031226.2;

[0132] the IGFBP5 mRNA having Genbank Accession Number NM_{—}000599.3;

[0133] the KCNK3 mRNA having Genbank Accession Number NM_{—}002246.2;

[0134] the SMAD7 mRNA having Genbank Accession Number NM_{—}001190821.1;

[0135] the SMAD7 mRNA having Genbank Accession Number NM_{—}001190822.1;

[0136] the SMAD7 mRNA having Genbank Accession Number NM_{—}001190823.1;

[0137] the SMAD7 mRNA having Genbank Accession Number NM_{—}005904.3;

[0138] the EGR3 mRNA having Genbank Accession Number NM_{—}001199880.1;

[0139] the EGR3 mRNA having Genbank Accession Number NM_{—}001199881.1;

[0140] the EGR3 mRNA having Genbank Accession Number NM_{—}004430.2;

[0141] the FN1 mRNA having Genbank Accession Number NM_{—}002026.2;

[0142] the FN1 mRNA having Genbank Accession Number NM_{—}054034.2;

[0143] the FN1 mRNA having Genbank Accession Number NM_{—}212474.1;

[0144] the FN1 mRNA having Genbank Accession Number NM_{—}212476.1;

[0145] the FN1 mRNA having Genbank Accession Number NM_{—}212478.1; and

[0146] the FN1 mRNA having Genbank Accession Number NM_{—}212482.1.

[0147] In certain other embodiments of the methods and kits of the invention for assessment of human oocyte quality, the level of at least one of the following polypeptides is determined:

[0148] the NEK6 polypeptide having Genbank Accession Number NP_{—}001138473.1:

[0149] the NEK6 polypeptide having Genbank Accession Number NP_{—}001159639.1;

[0150] the NEK6 polypeptide having Genbank Accession Number NP_{—}001159640.1;

[0151] the NEK6 polypeptide having Genbank Accession Number NP_{—}001159641.1;

[0152] the NEK6 polypeptide having Genbank Accession Number NP_{—}001159642.1;

[0153] the NEK6 polypeptide having Genbank Accession Number NP_{—}001159643.1;

[0154] the NEK6 polypeptide having Genbank Accession Number NP_{—}055212.2;

[0155] the AQP11 polypeptide having Genbank Accession Number NP_{—}766627.1;

[0156] the CCDC126 polypeptide having Genbank Accession Number NP_{—}620126.2;

[0157] the KLF6 polypeptide having Genbank Accession Number NP_{—}001153596.1;

[0158] the KLF6 polypeptide having Genbank Accession Number NP_{—}001153597.1;

[0159] the KLF6 polypeptide having Genbank Accession Number NP_{—}001291.3;

[0160] the ACPP polypeptide having Genbank Accession Number NP_{—}001127666.1;

[0161] the ACPP polypeptide having Genbank Accession Number NP_{—}001090.2;

[0162] the IGFBP4 polypeptide having Genbank Accession Number NP_{—}001543.2;

[0163] the IGF1 polypeptide having Genbank Accession Number NP_{—}000609.1;

[0164] the IGF1 polypeptide having Genbank Accession Number NP_{—}001104753.1;

[0165] the IGF1 polypeptide having Genbank Accession Number NP_{—}001104754.1;

[0166] the IGF1 polypeptide having Genbank Accession Number NP_{—}001104755.1;

[0167] the IRS1 polypeptide having Genbank Accession Number NP_{—}005535.1;

[0168] the FOSL2 polypeptide having Genbank Accession Number NP_{—}005244.1;

[0169] the HRAS polypeptide having Genbank Accession Number NP_{—}001123914.1;

[0170] the HRAS polypeptide having Genbank Accession Number NP_{—}005334.1;

[0171] the HRAS polypeptide having Genbank Accession Number NP_{—}789765.1;

[0172] the CLU polypeptide having Genbank Accession Number NP_{—}001164609.1;

[0173] the CLU polypeptide having Genbank Accession Number NP_{—}001822.2;

[0174] the CLU polypeptide having Genbank Accession Number NP_{—}976084.1;

[0175] the HSD17B1 polypeptide having Genbank Accession Number NP_{—}000404.2;

[0176] the HSDL1 polypeptide having Genbank Accession Number NP_{—}001139523.1;

[0177] the HSDL1 polypeptide having Genbank Accession Number NP_{—}113651.4;

[0178] the HSD11B2 polypeptide having Genbank Accession Number NP_{—}000187.3;

[0179] the STC1 polypeptide having Genbank Accession Number NP_{—}003146.1;

[0180] the CYP11A1 polypeptide having Genbank Accession Number NP_{—}000772.2;

[0181] the CYP11A1 polypeptide having Genbank Accession Number NP_{—}001093243.1;

[0182] the GMNN polypeptide having Genbank Accession Number NP_{—}056979.1;

[0183] the HSD3B2 polypeptide having Genbank Accession Number NP_{—}000189.1;

[0184] the HSD3B2 polypeptide having Genbank Accession Number NP_{—}001159592.1;

[0185] the CYP19A1 polypeptide having Genbank Accession Number NP_{—}000094.2;

[0186] the CYP19A1 polypeptide having Genbank Accession Number NP_{—}112503.1;

[0187] the IGFBP5 polypeptide having Genbank Accession Number NP_{—}000590.1;

[0188] the KCNK3 polypeptide having Genbank Accession Number NP_{—}002237.1;

[0189] the SMAD7 polypeptide having Genbank Accession Number NP_{—}001177750.1;

[0190] the SMAD7 polypeptide having Genbank Accession Number NP_{—}001177751.1;

[0191] the SMAD7 polypeptide having Genbank Accession Number NP_{—}001177752.1;

[0192] the SMAD7 polypeptide having Genbank Accession Number NP_{—}005895.1;

[0193] the EGR3 polypeptide having Genbank Accession Number NP_{—}001186809.1;

[0194] the EGR3 polypeptide having Genbank Accession Number NP_{—}001186810.1;

[0195] the EGR3 polypeptide having Genbank Accession Number NP_{—}004421.2;

[0196] the FN1 polypeptide having Genbank Accession Number NP_{—}002017.1;

[0197] the FN1 polypeptide having Genbank Accession Number NP_{—}473375.2;

[0198] the FN1 polypeptide having Genbank Accession Number NP_{—}997639.1;

[0199] the FN1 polypeptide having Genbank Accession Number NP_{—}997641.1;

[0200] the FN1 polypeptide having Genbank Accession Number NP_{—}997643.1; and

[0201] the FN1 polypeptide having Genbank Accession Number NP_{—}997647.1.

[0202] In certain embodiments of the methods and kits of the invention for assessment of pig oocyte quality, the level of at least one of the following mRNAs is determined:

[0203] the KLF6 mRNA having Genbank Accession Number NM_{—}001134353.2;

[0204] the IGFBP4 mRNA having Genbank Accession Number NM_{—}001123129.1;

[0205] the IGF1 mRNA having Genbank Accession Number NM_{—}214256.1;

[0206] the HRAS mRNA having Genbank Accession Number NM_{—}001044537.1;

[0207] the CLU mRNA having Genbank Accession Number NM_{—}213971.1;

[0208] the HSD17B1 mRNA having Genbank Accession Number NM_{—}001128472.1;

[0209] the HSD11B2 mRNA having Genbank Accession Number NM_{—}213913.1;

[0210] the STC1 mRNA having Genbank Accession Number NM_{—}001103212.1;

[0211] the CYP11A1 mRNA having Genbank Accession Number NM_{—}214427.1;

[0212] the CYP19A1 mRNA having Genbank Accession Number NM_{—}214429.1;

[0213] the IGFBP5 mRNA having Genbank Accession Number NM_{—}214099.1;

[0214] the SMAD7 mRNA having Genbank Accession Number XM_{—}001927582.1;

[0215] the ACPP mRNA having Genbank Accession Number XM_{—}003132419.1;

[0216] the IRS1 mRNA having Genbank Accession Number EU681268.1;

[0217] the EGR3 mRNA having Genbank Accession Number XM_{—}003132807.1;

[0218] the FN1 mRNA having Genbank Accession Number XM_{—}003133641.1;

[0219] the FN1 mRNA having Genbank Accession Number XM_{—}003133642.1; and

[0220] the FN1 mRNA having Genbank Accession Number XM_{—}003133643.1.

[0221] In certain embodiments of the methods and kits of the invention for assessment of pig oocyte quality, the level of at least one of the following polypeptides is determined:

[0222] the KLF6 polypeptide having Genbank Accession Number NP_{—}001127825.1;

[0223] the IGFBP4 polypeptide having Genbank Accession Number NP_{—}001116601.1;

[0224] the IGF1 polypeptide having Genbank Accession Number NP_{—}999421.1;

[0225] the HRAS polypeptide having Genbank Accession Number NP_{—}001038002.1;

[0226] the CLU polypeptide having Genbank Accession Number NP_{—}999136.1;

[0227] the HSD17B1 polypeptide having Genbank Accession Number NP_{—}001121944.1;

[0228] the HSD11B2 polypeptide having Genbank Accession Number NP_{—}999078.1;

[0229] the STC1 polypeptide having Genbank Accession Number NP_{—}001096682.1;

[0230] the CYP11A1 polypeptide having Genbank Accession Number NP_{—}999592.1;

[0231] the CYP19A1 polypeptide having Genbank Accession Number NP_{—}999594.1;

[0232] the IGFBP5 polypeptide having Genbank Accession Number NP_{—}999264.1;

[0233] the SMAD7 polypeptide having Genbank Accession Number XP_{—}001927617.1;

[0234] the ACPP polypeptide having Genbank Accession Number XP_{—}003132467.1;

[0235] the IRS1 polypeptide having Genbank Accession Number ACG59405.1;

[0236] the EGR3 polypeptide having Genbank Accession Number XP_{—}003132855.1;

[0237] the FN1 polypeptide having Genbank Accession Number XP_{—}003133689.1;

[0238] the FN1 polypeptide having Genbank Accession Number XP_{—}003133690.1; and

[0239] the FN1 polypeptide having Genbank Accession Number XP_{—}003133691.1.

[0240] As envisioned in the present invention with respect to the disclosed compositions of matter and methods, in one aspect the embodiments of the invention comprise the components and/or steps disclosed herein. In another aspect, the embodiments of the invention consist essentially of the components and/or steps disclosed herein. In yet another aspect, the embodiments of the invention consist of the components and/or steps disclosed herein.

### BRIEF DESCRIPTION OF THE DRAWINGS

[0241] FIGS. 1 and 2 are graphs showing the differential RNA expression values observed by gene expression array hybridization analysis and quantitative RT-PCR, respectively, for the indicated genes in cumulus cells associated with in vitro-matured versus in vivo-matured rhesus monkey oocytes. The genes indicated by asterisk (*) are the 24 genes selected as the marker genes according to the present invention.

### DEFINITIONS

[0242] As used herein, each of the following terms has the meaning associated with it in this section.

[0243] The articles “a” and “an” are used herein to refer to one or to more than one (i.e. to at least one) of the grammatical object of the article. By way of example, “an element” means one element or more than one element.

[0244] The term “about” will be understood by persons of ordinary skill in the art and will vary to some extent depending on the context in which it is used. As used herein, “about” is meant to encompass variations of ±20% or ±10%, more preferably ±5%, even more preferably ±1%, and still more preferably ±0.1%.

[0245] The term “antibody,” as used herein, refers to an immunoglobulin molecule which is able to specifically bind to a specific epitope on an antigen. Antibodies can be intact immunoglobulins derived from natural sources or from recombinant sources and can be immunoreactive portions of intact immunoglobulins. Antibodies are typically tetramers of immunoglobulin molecules. The antibodies that may be used in the practice of the present invention may exist in a variety of forms including, for example, polyclonal antibodies, monoclonal antibodies, Fv, Fab and F(ab)2, as well as single chain antibodies and humanized antibodies (Harlow et al., 1999, Using Antibodies: A Laboratory Manual, Cold Spring Harbor Laboratory Press, New York; Harlow et al., 1989, Antibodies: A Laboratory Manual, Cold Spring Harbor, N.Y.; Houston et al., 1988, Proc. Natl. Acad. Sci. USA 85:5879-5883; Bird et al., 1988, Science 242:423-426).

[0246] A cumulus cell or granulosa cells is “associated” with a particular oocyte if it is contained in or obtained from the same follicle as the particular oocyte.

[0247] The term “complementary” refers to nucleic acid sequences that base-pair according to the standard Watson-Crick complementary rules, or that are capable of hybridizing to a particular nucleic acid segment under relatively stringent conditions. Nucleic acid polymers are optionally complementary across only portions of their entire sequences.

[0248] The term “control” or “reference standard” describes a material comprising a level of marker expression products of one or more or the marker genes listed herein, such that the control or reference standard may serve as a comparator against which a sample can be compared. By way of non-limiting examples, a control or reference standard may include a sample derived from a cumulus cell or granulosa cell associated with an oocyte of known low (relatively) quality, such as an oocyte that is matured in vitro, or a known low quality oocyte matured in vivo.

[0249] “Encoding” refers to the inherent property of specific sequences of nucleotides in a polynucleotide, such as a gene, a cDNA, or an mRNA, to serve as templates for synthesis of other polymers and macromolecules in biological processes having either a defined sequence of nucleotides (i.e., rRNA, tRNA and mRNA) or a defined sequence of amino acids and the biological properties resulting therefrom. Thus, a gene encodes a protein if transcription and translation of mRNA corresponding to that gene produces the protein in a cell or other biological system. Both the coding strand, the nucleotide sequence of which is identical to the mRNA sequence and is usually provided in sequence listings, and the non-coding strand, used as the template for transcription of a gene or cDNA, can be referred to as encoding the protein or other product of that gene or cDNA.

[0250] “Gene expression” or “expression” as used herein refers to the process by which information from a gene is made into a functional gene product, such as RNA or protein. Thus, the “level of expression” of a gene product of a marker gene of the, in a sample of interest, refers to the level of RNA, particularly the level of mRNA, or the level of the encoded protein, and is not intended to be limited to either.

[0251] The term “gene” refers to a nucleic acid (e.g., DNA) sequence that comprises coding sequences necessary for the production of a polypeptide, precursor, or RNA (e.g., mRNA, rRNA, tRNA). The term “gene” encompasses both cDNA and genomic forms of a gene.

[0252] A genomic form of a gene contains the coding region or “exons” interrupted with non-coding sequences termed “introns” or “intervening regions” or “intervening sequences.” Introns are removed or “spliced out” from the nuclear or primary transcript; introns therefore are absent in the messenger RNA (mRNA) transcript. In addition to containing introns, genomic forms of a gene can also include sequences located on both the 5′ and 3′ end of the sequences that are present on the RNA transcript. These sequences are referred to as “flanking” sequences or regions (these flanking sequences are located 5′ or 3′ to the non-translated sequences present on the mRNA transcript).

[0253] Both transcription and translation are included in the “gene expression” of the present invention. Accordingly, both of detection at the transcription level (mRNA, cDNA) and detection at the translation level (protein) are included in the determination of marker gene expression level according to the present invention.

[0254] The term “hybridization” refers to the process in which two single-stranded nucleic acids bind non-covalently to form a double-stranded nucleic acid; triple-stranded hybridization is also theoretically possible. Complementary sequences in the nucleic acids pair with each other to form a double helix. The resulting double-stranded nucleic acid is a “hybrid.” Hybridization may be between, for example tow complementary or partially complementary sequences. The hybrid may have double-stranded regions and single stranded regions. The hybrid may be, for example, DNA:DNA, RNA:DNA or DNA:RNA. Hybrids may also be formed between modified nucleic acids. One or both of the nucleic acids may be immobilized on a solid support. Hybridization techniques may be used to detect and isolate specific sequences, measure homology, or define other characteristics of one or both strands.

[0255] As used herein, an “instructional material” includes a publication, a recording, a diagram, or any other medium of expression, which can be used to communicate the usefulness of the invention in the kit for determining the progression of a disease. The instructional material of the kit of the invention may, for example, be affixed to a container, which contains a reagent of the invention or be shipped together with a container, which contains a reagent. Alternatively, the instructional material may be shipped separately from the container with the intention that the instructional material and the reagent be used cooperatively by the recipient.

[0256] By an “in vitro matured mammalian oocyte” is meant an oocyte that is matured outside the body of a mammal. By an “in vivo matured mammalian oocyte” is meant an oocyte that is matured within the body of a mammal.

[0257] The term “marker gene” or “marker” as used herein means any of the mammalian genes ACPP, AQP11, CCDC126, CLU, CYP11A1, CYP19A1, EGR3, FN1, FOSL2, GMNN, HRAS, HSD3B2, HSD17B1, HSD11B2, HSDL1, IGF1, IGFBP4, IGFBP5, IRS1, KCNK3, KLF6, NEK6, SMAD7 or STC1, inclusive of their various homologs among mammalian species.

[0258] The terms “marker expression” or “marker gene expression” as used herein, encompasses the transcription, translation, post-translation modification, and phenotypic manifestation of a marker gene, including all aspects of the transformation of information encoded in a gene into RNA or protein. By way of non-limiting example, marker expression includes transcription into messenger RNA (mRNA) and translation into protein, as well as transcription into types of RNA such as transfer RNA (tRNA) and ribosomal RNA (rRNA) that are not translated into protein.

[0259] By the phrase “determining the level of marker expression” is meant an assessment of the degree of expression of a marker in a sample at the nucleic acid or protein level, using technology available to the skilled artisan to detect a sufficient portion of any marker expression product (including nucleic acids and proteins) of a marker gene, such that the sufficient portion of the marker expression product detected is indicative of the expression of any one of the marker genes.

[0260] “Measuring” or “measurement,” or alternatively “detecting” or “detection,” or alternatively “determining” or “determine” means assessing the presence, absence, quantity or amount of either a given substance within a sample, including the derivation of qualitative or quantitative concentration levels of such substances.

[0261] Nucleic acids detected or utilized in the practice of the present invention may include any polymer or oligomer of pyrimidine and purine bases, preferably cytosine, thymine, and uracil, and adenine and guanine, respectively. (See Albert L. Lehninger, Principles of Biochemistry, at 793-800 (Worth Pub. 1982) which is herein incorporated in its entirety for all purposes). Indeed, the present invention contemplates any deoxyribonucleotide, ribonucleotide or peptide nucleic acid component, and any chemical variants thereof, such as methylated, hydroxymethylated or glucosylated forms of these bases, and the like. The polymers or oligomers may be heterogeneous or homogeneous in composition, and may be isolated from naturally occurring sources or may be artificially or synthetically produced. In addition, the nucleic acids may be DNA or RNA, or a mixture thereof, and may exist permanently or transitionally in single-stranded or double-stranded form, including homoduplex, heteroduplex, and hybrid states.

[0262] An “oligonucleotide” or “polynucleotide” is a nucleic acid ranging from at least 2, preferably at least 8, 15 or 25 nucleotides in length, but may be up to 50, 100, 1000, or 5000 nucleotides long or a compound that specifically hybridizes to a polynucleotide. Polynucleotides include sequences of deoxyribonucleic acid (DNA) or ribonucleic acid (RNA) or mimetics thereof which may be isolated from natural sources, recombinantly produced or artificially synthesized. A further example of a polynucleotide of the present invention may be a peptide nucleic acid (PNA). (See U.S. Pat. No. 6,156,501 which is hereby incorporated by reference in its entirety.) The invention also encompasses situations in which there is a nontraditional base pairing such as Hoogsteen base pairing which has been identified in certain tRNA molecules and postulated to exist in a triple helix.

[0263] By “oocyte maturation” is meant the resumption of meiosis of a germinal-vesicle intact stage mammalian oocyte, including germinal vesicle breakdown, meiotic progression, extrusion of the first polar body, and subsequent meiotic arrest, e.g., at the metaphase II stage of meiosis (stage of arrest may vary with species), the stage at which the oocyte is normally ovulated and ready for fertilization. This process is known to encompass both nuclear and cytoplasmic changes in the oocyte as well as changes in the cumulus cell phenotype (e.g., cumulus cell expansion).

[0264] “Primer” refers to a polynucleotide that is capable of specifically hybridizing to a designated polynucleotide template and providing a point of initiation for synthesis of a complementary polynucleotide. Such synthesis occurs when the polynucleotide primer is placed under conditions in which synthesis is induced, i.e., in the presence of nucleotides, a complementary polynucleotide template, and an agent for polymerization such as DNA polymerase. Typical uses of primers include, but are not limited to, sequencing reactions and amplification reactions. A primer is typically single-stranded, but may be double-stranded. Primers are typically deoxyribonucleic acids, but a wide variety of synthetic and naturally-occurring primers are useful for many applications. A primer is complementary to the template to which it is designed to hybridize to serve as a site for the initiation of synthesis, but need not reflect the exact sequence of the template. In such a case, specific hybridization of the primer to the template depends on the stringency of the hybridization conditions. Primers can be labeled with, e.g., detectable moieties, such as chromogenic, radioactive or fluorescent moieties, or moieties for isolation, e.g., biotin.

[0265] As used herein a “probe” is defined as a nucleic acid capable of binding to a target nucleic acid of complementary sequence through one or more types of chemical bonds, usually through complementary base pairing, usually through hydrogen bond formation. A probe specifically hybridizes to a target complementary polynucleotide, but need not reflect the exact complementary sequence of the template. In such a case, specific hybridization of the probe to the target depends on the stringency of the hybridization conditions. As used herein, a probe may include natural (i.e. A, G, U, C, or T) or modified bases (7-deazaguanosine, inosine, etc.). In addition, a linkage other than a phosphodiester bond may join the bases in probes, so long as it does not interfere with hybridization. Thus, probes may be peptide nucleic acids in which the constituent bases are joined by peptide bonds rather than phosphodiester linkages.

[0266] As used herein, the “quality” of an oocyte generally means the oocyte's ability to undergo successful fertilization, and then support cleavage, preimplantation development, implantation, and development to birth. A higher quality oocyte is more likely to undergo successful fertilization and term development than a lower quality oocyte.

[0267] As used herein, the term “a reagent that specifically detects expression levels” refers to one or more reagents used to detect the expression of one or more genes (e.g., a gene selected from the 24 marker genes provided herein). Examples of suitable reagents include, but are not limited to, nucleic acid probes capable of specifically hybridizing to the gene of interest, PCR primers capable of specifically amplifying the gene of interest, and antibodies capable of specifically binding to proteins expressed by the gene of interest. The term “amplify” is used in the broad sense to mean creating an amplification product. “Amplification”, as used herein, generally refers to the process of producing multiple copies of a desired sequence, particularly those of a sample. A “copy” does not necessarily mean perfect sequence complementarity or identity to the template sequence.

[0268] “Sample” or “biological sample” as used herein means a biological material that contains a substance under assay for determination of gene product expression level. The sample may contain any biological material suitable for detecting the desired biomarker, and may comprise cellular and/or non-cellular material.

[0269] The term “solid support,” “support,” and “substrate” as used herein are used interchangeably and refer to a material or group of materials having a rigid or semi-rigid surface or surfaces. In one embodiment, at least one surface of the solid support will be substantially flat, although in some embodiments it may be desirable to physically separate synthesis regions for different compounds with, for example, wells, raised regions, pins, etched trenches, or the like. According to other embodiments, the solid support(s) will take the form of beads, resins, gels, microspheres, or other geometric configurations. See U.S. Pat. No. 5,744,305 for exemplary substrates.

[0270] “Specifically binds” as used herein in the context of an antibody or an aptamer refers to antibody or aptamer binding to a predetermined antigen with a preference that enables the antibody to be used to distinguish the antigen from others to an extent that permits the detection of the target antigens described herein.

### DETAILED DESCRIPTION OF THE INVENTION

[0271] We have found that the transcriptomes of IVM and VVM companion cumulus cells display extensive differences related to patterns of gene regulation maturation. We have identified 24 genes (“marker genes”) that are differentially expressed between IVM and VVM cumulus: ACPP, AQP11, CCDC126, CLU, CYP11A1, CYP19A1, EGR3, FN1, FOSL2, GMNN, HRAS, HSD3B2, HSD17B1, HSD11B2, HSDL1, IGF1, IGFBP4, IGFBP5, IRS1, KCNK3, KLF6, NEK6, SMAD7 and STC1. As oocytes matured by IVM are of reduced quality compared to in vivo matured oocytes, the 24 differentially expressed genes provide novel markers of oocyte quality for clinical diagnostics. In particular, analysis of the expression level of one or more of the 24 marker genes in a sample derived from cumulus cells or granulosa cells associated with a particular oocyte provides information on the quality of the oocyte, for purposes of fertilization and/or implantation. Oocytes of high quality are more likely to sustain successful fertilization and implantation; oocytes of low quality, are less likely to sustain successful fertilization and implantation. The assessment is non-invasive and does not harm the oocyte, as the analysis of oocyte quality is obtained indirectly, from cumulus cells or granulosa cells associated with the oocyte under study. The assessment of oocyte quality is performed before fertilization and term development, and reduces the fertilization and subsequent term development of fertilized oocytes that may be of poorer viability. Thus, the assessment of oocyte quality may be performed before implantation, to access the competence of the oocyte for implantation, fertilization or preservation. By “preservation” is meant storage under conditions that will maintain oocyte and/or embryo viability for subsequent use, such as long term storage including cryopreservation.

[0272] Unlike expression profiling of oocytes (Lee, et al. (2008) Physiol Genomics 35(2):145-58), cumulus cells associated with in vivo or in vitro maturation reveal a much larger degree of difference, and provide the basis for determining oocyte quality by associated cumulus cell phenotype, without harm to the oocyte.

[0273] Without wishing to be bound by any theory, the difference between IVM and VVM is that the last 24 hour of maturation in response to hormonal stimulation in IVM occurs within cumulus-oocyte complexes that have been removed from the follicular environment. Follicular signals during the final 24 hours of maturation must normally modulate cumulus cell and/or oocyte phenotype in a manner that confers high oocyte quality. Developmental competence is acquired in concert with final nuclear and cytoplasmic maturation, which occur at the end of the maturation period. IVM conditions do not adequately support this transition. Hence, oocytes matured by IVM are of reduced quality compared to in vivo matured oocytes.

[0274] According to the present invention, marker gene expression level is assayed in samples derived from cumulus cells or granulosa cells associated with an oocyte, after maturation of the oocyte. A sample “derived” from a cumulus or granulosa cell is a composition comprising biological molecules contained in, secreted by or extracted from such cells, which biological molecules may be assayed directly or indirectly (such as following nucleic acid amplification, for example) to determine the level of marker gene expression by said cumulus cell or granulosa cell.

[0275] The product of oocyte maturation is a mature egg that has completed nuclear, plasma membrane and cytoplasmic changes that enable normal fertilization and subsequent development to occur. I one embodiment, analysis of oocyte quality according to the present invention is carried out with respect to cumulus cells or granulosa cells associated with an in vivo-matured oocyte. Methods for harvesting pre- and post-maturation oocytes, and their associated cumulus and/or granulosa cells are known to those skilled in the art. For example, trituration with a narrow bore pipette of cumulus-oocyte complexes retrieved from the reproductive tract or microsurgical removal using a small pipette can be used to remove clusters of cumulus cells, creating a cumulus cell “biopsy” of each individual oocyte. RNA is extracted from the removed cumulus cells by known techniques.

[0276] Determination of marker gene expression levels in the practice of the inventive method may be performed by any suitable method. For example, marker gene expression level may be determined with respect to expression products comprising RNA (e.g., mRNA) or protein, derived from cumulus cells or granulosa cells associated with an oocyte subject to quality determination. A cumulus cell or granulosa cell is “associated” with a particular oocyte when it is found in the same follicle containing the oocyte.

[0277] In one embodiment, cumulus oocyte complexes (COCs) are obtained following in vivo stimulation to maturation. An aliquot of cumulus cells associated with each individual oocyte subject to analysis is removed from the complex by known methods. For example, trituration with a narrow bore pipette of cumulus-oocyte complexes retrieved from the reproductive tract or microsurgical removal using a small pipette can be used to remove clusters of cumulus cells, creating a cumulus cell “biopsy” of each individual oocyte. Alternatively, granulosa cells can be recovered from individual follicular aspirates (e.g., laparoscopically). RNA is extracted from the removed cumulus or granulosa cells by known techniques.

[0278] In some embodiments, marker gene expression according to the invention is detected by determining the level of the corresponding mRNA. Methods that may be utilized for determining the level of mRNA expression in a sample are well known in the art and include, but are not limited to, polymerase chain reaction analyses, Northern analyses, and probe arrays. Any RNA isolation technique that does not select against the isolation of mRNA can be utilized for the purification of RNA from pancreatic tissue samples (see, e.g., Ausubel, ed., 1999, Current Protocols in Molecular Biology (John Wiley & Sons, New York). Additionally, large numbers of tissue samples can readily be processed using techniques well known to those of skill in the art, such as, for example, the single-step RNA isolation process of Chomczynski, 1989, U.S. Pat. No. 4,843,155). In some embodiments, the RNA sample may be depleted of one or more RNAs, for example, an RNA sample depleted of rRNA. General methods for total RNA extraction are well known in the art and are disclosed in standard textbooks on molecular biology. Numerous different and versatile kits can be used to extract RNA (i.e., total RNA or mRNA) and are commercially available from, for example, Ambion, Inc. (Austin, Tex.), Amersham Biosciences (Piscataway, N.J.), BD Biosciences Clontech (Palo Alto, Calif.), BioRad Laboratories (Hercules, Calif.), GIBCO BRL (Gaithersburg, Md.), and Giagen, Inc. (Valencia, Calif.). User Guides that describe in great detail the protocol to be followed are usually included in all these kits. The practice of the invention is not limited to any one method of mRNA detection or quantification recited herein, but rather encompasses all presently known or heretofore unknown methods.

[0279] In one embodiment, marker gene expression is quantified with respect to a control using a Northern blot analysis. In brief, mRNA is isolated from a given sample using known techniques. The mRNA is then electrophoresed to separate the mRNA species and the mRNA is transferred from the gel to a nitrocellulose membrane. Labeled probes are used to quantify the target marker mRNA.

[0280] In another embodiment, marker gene expression is quantified with respect to a control using a Southern blot analysis. Briefly, mRNA is isolated and reverse transcribed to produce cDNA. The cDNA is then optionally digested and run on a gels in buffer and transferred to membranes. Hybridization is then carried out using nucleic acid probes specific for the target mRNA.

[0281] The probe that binds the marker gene expression product includes complementary nucleic acids. For example, the nucleic acid reagents may include oligonucleotides (labeled or non-labeled) fixed to a substrate, labeled oligonucleotides not bound with a substrate, pairs of PCR primers, molecular beacon probes, and the like.

[0282] The probe may also comprise fragments of nucleotide sequences complementary to the maker gene expression product. A fragment may be defined to be at least about 10 nucleotides (nt), preferably at least about 15 nt, and more preferably at least about 20 nt, still more preferably at least about 30 nt, and even more preferably, at least about 40 nt in length. Such fragments are useful as probes and primers as discussed herein and can be incorporated into kits for use according to the present invention. Of course, larger DNA fragments are also useful according to the present invention.

[0283] The nucleotide sequence of the probe molecule may be selected to hybridize to the target marker gene expression product under stringent conditions. The particular hybridization technique is not essential to the invention. Methods for conducting polynucleotide hybridization assays are well known in the art. Any technique commonly used in the art is within the scope of the present invention. Typical probe technology is described in U.S. Pat. No. 4,358,535 to Falkow et al., incorporated by reference herein. For example, hybridization can be carried out in a solution containing 6×SSC (10×SSC: 1.5 M sodium chloride, 0.15 M sodium citrate, pH 7.0), 5Denhardt's (1×Denhardt's: 0.2% bovine serum albumin, 0.2% polyvinylpyrrolidones, 0.02% Ficoll 400), 10 mM EDTA, 0.5% SDS and about 10⁷ cpm of nick-translated DNA for 16 hours at 65° C.

[0284] Additionally, if hybridization is to an immobilized nucleic acid, a washing step may be utilized wherein probe binding to polynucleotides of low homology, or nonspecific binding of the probe, may be removed. For example, a stringent wash step may involve a buffer of 0.2×SSC and 0.5% SDS at a temperature of 65° C.

[0285] Additional information related to hybridization technology and, more particularly, the stringency of hybridization and washing conditions, may be found in Sambrook et al., Molecular Cloning: A Laboratory Manual, Second Edition, Cold Spring Harbor Laboratory, Cold Spring Harbor, N.Y. (1989), which is incorporated herein by reference.

[0286] Hybridization probes generally will comprise at least 15 nucleotides. Preferably, such probes will have at least 30 nucleotides and may have at least 50 nucleotides. In some embodiments, the probes will range between 30 and 50 nucleotides. In some embodiments, the probes will be at least about 50, 60, 70, 80, 90, 100, 110, 120, 130, 140, 150, 160, 170, 180, 190, 200, 210, 220, 230, 240, 250, 260, 270, 280, 290, 300 or more nucleotides in length.

[0287] In one embodiment, the hybridized nucleic acids are detected and quantified by one or more labels attached to the sample nucleic acids. The labels may be incorporated by any of a number of means well known to those of skill in the art. In one embodiment, the label is simultaneously incorporated during the amplification step in the preparation of the sample nucleic acids. Thus, for example, PCR with labeled primers or labeled nucleotides will provide a labeled amplification product. In another embodiment, transcription amplification using a labeled nucleotide (e.g. fluorescein-labeled UTP and/or CTP) incorporates a label into the transcribed nucleic acids. In another embodiment PCR amplification products are fragmented and labeled by terminal deoxytransferase and labeled dNTPs. Alternatively, a label may be added directly to the original nucleic acid sample (e.g., mRNA, polyA mRNA, cDNA, etc.) or to the amplification product after the amplification is completed. Means of attaching labels to nucleic acids are well known to those of skill in the art and include, for example, nick translation or end-labeling (e.g. with a labeled RNA) by kinasing the nucleic acid and subsequent attachment (ligation) of a nucleic acid linker joining the sample nucleic acid to a label (e.g., a fluorophore). In another embodiment label is added to the end of fragments using terminal deoxytransferase.

[0288] Methods of hybridization signal detection which may be utilized are described, for example, in U.S. Pat. Nos. 5,143,854, 5,578,832; 5,631,734; 5,834,758; 5,936,324; 5,981,956; 6,025,601; 6,141,096; 6,185,030; 6,201,639; 6,218,803; and 6,225,625, and in PCT Application PCT/US99/06097 (published as WO99/47964), each of which also is hereby incorporated by reference.

[0289] Comparison of gene expression levels according to the methods of the present invention is preferably performed after the gene expression levels obtained have been corrected for both differences in the amount of sample assayed and variability in the quality of the sample used (e.g., amount and quality of mRNA tested). Correction may be carried out by normalizing the levels against reference genes in the same sample. Typically, “housekeeping genes”, such as actin, GAPDH, HPRT, CPB, G6PD, histone H2A, or mitochondrial ribosomal protein S18C, gene are used for this normalization. Alternatively or additionally, normalization can be based on the mean or median signal (e.g., Ct in the case of RT-PCR) of all assayed genes or a large subset thereof (global normalization approach). Expression levels of a marker gene may be normalized by correcting the absolute expression level of a marker by comparing its expression to the expression of a gene that is not a marker, e.g., a housekeeping gene that is constitutively expressed. Suitable genes for normalization include housekeeping genes such as actin, GAPDH, HPRT, CPB, G6PD, histone H2A, or mitochondrial ribosomal protein S18C gene. This normalization allows the comparison of the expression level in one sample, e.g., a test sample to a control sample.

[0290] Prior to or concurrent with marker expression analysis, the expression product sample may be amplified using a variety of mechanisms, some of which may employ PCR. See, for example, PCR Technology: Principles and Applications for DNA Amplification (Ed. H. A. Erlich, Freeman Press, NY, N.Y., 1992); PCR Protocols: A Guide to Methods and Applications (Eds. Innis, et al., Academic Press, San Diego, Calif., 1990); Mattila et al., Nucleic Acids Res. 19, 4967 (1991); Eckert et al., PCR Methods and Applications 1, 17 (1991); PCR (Eds. McPherson et al., IRL Press, Oxford); and U.S. Pat. Nos. 4,683,202, 4,683,195, 4,800,159 4,965,188, and 5,333,675.

[0291] Other suitable amplification methods include the ligase chain reaction (LCR) (for example, Wu and Wallace, Genomics 4, 560 (1989), Landegren et al., Science 241, 1077 (1988) and Barringer et al. Gene 89:117 (1990)); transcription amplification (Kwoh et al., Proc. Natl. Acad. Sci. USA 86, 1173 (1989) and WO88/10315), self-sustained sequence replication (Guatelli et al., Proc. Nat. Acad. Sci. USA, 87, 1874 (1990) and WO90/06995); selective amplification of target polynucleotide sequences (U.S. Pat. No. 6,410,276); consensus sequence primed PCR (CP-PCR) (U.S. Pat. No. 4,437,975); arbitrarily primed PCR (AP-PCR) (U.S. Pat. Nos. 5,413,909, 5,861,245); degenerate oligonucleotide primed PCR (DOP-PCR) (Wells et al., 1999, Nuc Acids Res 27:1214-1218); nucleic acid based sequence amplification (NABSA) (See, U.S. Pat. Nos. 5,409,818, 5,554,517, and 6,063,603, each of which is incorporated herein by reference); anchored PCR; competitive PCR (see, for example, U.S. Pat. No. 5,747,251); and rapid amplification of cDNA ends (RACE). Other amplification methods that may be used are described in, U.S. Pat. Nos. 5,242,794, 5,494,810, 4,988,617 and in U.S. Ser. No. 09/854,317.

[0292] Additional methods of sample preparation and techniques for reducing the complexity of a nucleic sample are described in Dong et al., Genome Research 11, 1418 (2001), in U.S. Pat. Nos. 6,361,947, 6,391,592 and US Patent Application Publication 20030096235 and US Patent Application Publication 20030082543).

[0293] According to one embodiment, mRNA obtained from a sample is reverse-transcribed and the cDNA subjected to a whole transcriptome amplification, for example, using the QUANTITECT Kit (Qiagen, Inc. 27220 Turnberry Lane, Valencia, Calif. 91355) or the OVATION PICO Kit (NuGen, Technologies, Bemmel, The Netherlands). Quantitative real time PCR (qRT-PCR) is performed on, e.g., about 100 ng of cDNA for each sample. qRT-PCR may be performed on a variety of commercially available platforms, such as the Roche LIGHTCYCLER system (Roche Diagnostics, Indianapolis, Ind.) or the ABI STEPONE PLUS instrument, using the manufacturer's recommendations (Applied Biosystems, Foster City, Calif.). Primers for qRT-PCR may be designed based on the sequences of the target nucleic acid and the RT-PCT platform's manufacturers' recommendations and/or instrument requirements.

[0294] Alternatively, gene expression levels may be determined by amplifying complementary DNA (cDNA) or complementary RNA (cRNA) produced from mRNA and analyzing it using a microarray. A number of different array configurations and methods of their production are known to those skilled in the art (see, for example, U.S. Pat. Nos. 5,445,934; 5,532,128; 5,556,752; 5,242,974; 5,384,261; 5,405,783; 5,412,087; 5,424,186; 5,429,807; 5,436,327; 5,472,672; 5,527,681; 5,529,756; 5,545,531; 5,554,501; 5,561,071; 5,571,639; 5,593,839; 5,599,695; 5,624,711; 5,658,734; and 5,700,637). Microarray technology allows for the measurement of the steady-state mRNA level of a large number of genes simultaneously. Microarrays currently in wide use include cDNA arrays and oligonucleotide arrays. Analyses using microarrays are generally based on measurements of the intensity of the signal received from a labeled probe used to detect a cDNA sequence from the sample that hybridizes to a nucleic acid probe immobilized at a known location on the microarray (see, for example, U.S. Pat. Nos. 6,004,755; 6,218,114; 6,218,122; and 6,271,002). Array-based gene expression methods are known in the art and have been described in numerous scientific publications as well as in patents (see, for example, M. Schena et al., Science, 1995, 270: 467-470; M. Schena et al., Proc. Natl. Acad. Sci. USA 1996, 93: 10614-10619; J. J. Chen et al., Genomics, 1998, 51: 313-324; U.S. Pat. Nos. 5,143,854; 5,445,934; 5,807,522; 5,837,832; 6,040,138; 6,045,996; 6,284,460; and 6,607,885).

[0295] Determination of marker gene expression level may also be carried out by quantifying with respect to a control the expressed polypeptide translated from the marker gene transcript. In this case, a protein sample is first prepared from a biological sample, e.g. a cell culture derived, from the cumulus cell or granulosa cell, and the expression of respective proteins is detected. In one embodiment, cellular protein is obtained from cell lysates of cumulus or granulosa cells, and the protein is quantified by standard methods. Any methods available in the art for detecting and quantifying polypeptide encoded by a marker gene according to the invention, is encompassed. Such methods may rely on utilizes a substance comprising a binding moiety for the polypeptide. Assays based on marker protein-specific biomolecule interaction include, but are not limited to, antibody-based assays, aptamer-based assays, receptor and ligand assays, enzyme activity assays, and allosteric regulator binding assays. The invention is not limited to any one method of protein quantification with respect to a control recited herein, but rather encompasses all presently known or heretofore unknown methods, such as methods that are discovered in the art. Proteins may be detected by other methods, e.g., mass spectroscopy analysis, that do not relying on a binding moiety.

[0296] In one embodiment, the substance comprises an antibody that specifically binds to a marker protein. Antibodies can be used in various immunoassay-based protein determination methods such as Western blot analysis, immunoprecipitation, radioimmunoassay (RIA), immunofluorescent assay, chemiluminescent assay, flow cytometry, immunocytochemistry and enzyme-linked immunosorbent assay (ELISA).

[0297] In an enzyme-linked immunosorbent assay (ELISA), an enzyme such as, but not limited to, horseradish peroxidase (HRP), alkaline phosphatase (AP), beta-galactosidase or urease can be linked, for example, to an antigen antibody or to a secondary antibody for use in a method of the invention. A horseradish-peroxidase detection system may be used, for example, with the chromogenic substrate tetramethylbenzidine (TMB), which yields a soluble product in the presence of hydrogen peroxide that is detectable at 450 nm. Other convenient enzyme-linked systems include, for example, the alkaline phosphatase detection system, which may be used with the chromogenic substrate p-nitrophenyl phosphate to yield a soluble product readily detectable at 405 nm. Similarly, a beta-galactosidase detection system may be used with the chromogenic substrate o-nitrophenyl-beta-D-galactopyranoside (ONPG) to yield a soluble product detectable at 410 nm. Alternatively, a urease detection system may be used with a substrate such as urea-bromocresol purple (Sigma Immunochemicals, St. Louis, Mo.). Useful enzyme-linked primary and secondary antibodies can be obtained from any number of commercial sources.

[0298] For chemiluminescence and fluorescence assays, chemiluminescent and fluorescent secondary antibodies may be obtained from any number of commercial sources. Fluorescent detection is also useful for detecting antigen or for determining a level of antigen in a method of the invention. Useful fluorochromes include, but are not limited to, DAPI, fluorescein, Hoechst 33258, R-phycocyanin, B-phycoerythrin, R-phycoerythrin, rhodamine, Texas red and lissamine-Fluorescein- or rhodamine-labeled antigen-specific antibodies.

[0299] Radioimmunoassays (RIAs) are described for example in Brophy et al. (1990, Biochem. Biophys. Res. Comm. 167:898-903) and Guechot et al. (1996, Clin. Chem. 42:558-563). Radioimmunoassays are performed, for example, using Iodine-125-labeled primary or secondary antibody.

[0300] Quantitative western blotting may also be used to determine the level of marker protein according to the present invention. Western blots are quantified using well known methods such as scanning densitometry (Parra et al., 1998, J. Vasc. Surg. 28:669-675).

[0301] A signal emitted from a detectable antibody is analyzed, for example, using a spectrophotometer to detect color from a chromogenic substrate; a radiation counter to detect radiation, such as a gamma counter for detection of Iodine-125; or a fluorometer to detect fluorescence in the presence of light of a certain wavelength. Where an enzyme-linked assay is used, quantitative analysis of the amount of antigen is performed using a spectrophotometer. It is understood that the assays of the invention can be performed manually or, if desired, can be automated and that the signal emitted from multiple samples can be detected simultaneously in many systems available commercially.

[0302] The antibody used to determine the level of a marker protein in a sample in an immunnoassay can comprise a polyclonal or monoclonal antibody. The antibody can comprise an intact antibody, or antibody fragments capable of specifically binding a marker protein. Such fragments include, but are not limited to, Fab and F(ab′)₂ fragments.

[0303] When the antibody used in the methods of the invention is a polyclonal antibody (IgG), the antibody is generated by inoculating a suitable animal with a marker protein, peptide or a fragment thereof. Antibodies produced in the inoculated animal which specifically bind the marker protein of the invention are then isolated from fluid obtained from the animal. Antibodies may be generated in this manner in several non-human mammals such as, but not limited to goat, sheep, horse, rabbit, and donkey. Methods for generating polyclonal antibodies are well known in the art and are described, for example in Harlow, et al. (1988, In: Antibodies, A Laboratory Manual, Cold Spring Harbor, N.Y.). These methods are not repeated herein as they are commonly used in the art of antibody technology.

[0304] When the antibody used in the methods of the invention is a monoclonal antibody, the antibody is generated using any well known monoclonal antibody preparation procedures such as those described, for example, in Harlow et al. (supra) and in Tuszynski et al. (1988), Blood, 72:109-115. Given that these methods are well known in the art, they are not replicated herein. Generally, monoclonal antibodies directed against a desired antigen are generated from mice immunized with the antigen using standard procedures as referenced herein. Monoclonal antibodies directed against full length or peptide fragments of a marker protein of the invention may be prepared using the techniques described in Harlow, et al., supra.

[0305] Techniques for detecting and quantifying (such as with respect to a control) antibody binding are well-known in the art. Antibody binding to a marker protein may be detected through the use of chemical reagents that generate a detectable signal that corresponds to the level of antibody binding and, accordingly, to the level of marker protein expression. Examples of such detectable substances include enzymes, prosthetic groups, fluorescent materials, luminescent materials, bioluminescent materials, and radioactive materials. Examples of suitable enzymes include horseradish peroxidase, alkaline phosphatase, β-galactosidase, or acetylcholinesterase; examples of suitable prosthetic group complexes include streptavidin/biotin and avidin/biotin; examples of suitable fluorescent materials include umbelliferone, fluorescein, fluorescein isothiocyanate, rhodamine, dichlorotriazinylamine fluorescein, dansyl chloride or phycoerythrin; an example of a luminescent material includes luminol; examples of bioluminescent materials include luciferase, luciferin, and aequorin; and examples of suitable radioactive material include ¹²⁵I, ¹³¹I, ³⁵S, or ³H.

[0306] Antibody binding may be detected through the use of a secondary antibody that is conjugated to a detectable label. Examples of detectable labels include but are not limited to polymer-enzyme conjugates. The enzymes in these complexes are typically used to catalyze the deposition of a chromogen at the antigen-antibody binding site, thereby resulting in cell staining that corresponds to expression level of the biomarker of interest. Preferred enzymes of particular interest include horseradish peroxidase (HRP) and alkaline phosphatase (AP).

[0307] A protein assay may be employed that combines antibody-protein binding with detection of the reporter nucleic acid by real-time PCR, e.g., TaqMan® Chemistry-Based Protein Assay, Applied BioSystems by Life Technologies Corporation, Carlsbad, Calif. The latter is a proximity ligation assay based upon Fredriksson et al., Nat. Biotechnol. 20:473-477 (2002) and Gullberg et al., Proc Natl Acad Sci USA. 101(22):8420-4 (2204).

[0308] Marker proteins of the invention can be detected and quantified by aptamer-based assays, which are very similar to antibody-based assays, but with the use of an aptamer instead of an antibody. An “aptamer-based” assay is thus an assay for the determination of polypeptide that relies on specific binding of an aptamer. An aptamer can be any polynucleotide, generally a RNA or a DNA, which has a useful biological activity in terms of biochemical activity or molecular recognition attributes. Usually, an aptamer has a molecular activity such as having an enzymatic activity or binding to a polypeptide at a specific region (i.e., similar to an epitope for an antibody) of the polypeptide. It is generally known in the art that an aptamer can be made by in vitro selection methods. In vitro selection methods include a well known method called systematic evolution of ligands by exponential enrichment (a.k.a. SELEX). Briefly, in vitro selection involves screening a pool of random polynucleotides for a particular polynucleotide that binds to a biomolecule, such as a polypeptide, or has a particular activity that is selectable. Generally, the particular polynucleotide represents a very small fraction of the pool, therefore, a round of amplification, usually via polymerase chain reaction, is employed to increase the representation of potentially useful aptamers. Successive rounds of selection and amplification are employed to exponentially increase the abundance of a particular aptamer. In vitro selection is described in Famulok, M.; Szostak, J. W., In Vitro Selection of Specific Ligand Binding Nucleic Acids, Angew. Chem. 1992, 104, 1001. (Angew. Chem. Int. Ed. Engl. 1992, 31, 979-988.); Famulok, M.; Szostak, J. W., Selection of Functional RNA and DNA Molecules from Randomized Sequences, Nucleic Acids and Molecular Biology, Vol 7, F. Eckstein, D. M. J. Lilley, Eds., Springer Verlag, Berlin, 1993, pp. 271; Klug, S.; Famulok, M., All you wanted to know about SELEX; Mol. Biol. Reports 1994, 20, 97-107; and Burgstaller, P.; Famulok, M. Synthetic ribozymes and the first deoxyribozyme; Angew. Chem. 1995, 107, 1303-1306 (Angew. Chem. Int. Ed. Engl. 1995, 34, 1189-1192), U.S. Pat. No. 6,287,765, U.S. Pat. No. 6,180,348, U.S. Pat. No. 6,001,570, U.S. Pat. No. 5,861,588, U.S. Pat. No. 5,567,588, U.S. Pat. No. 5,475,096, and U.S. Pat. No. 5,270,163, which are incorporated herein by reference.

[0309] Substantially pure marker proteins of the invention, which can be used as an immunogen for raising polyclonal or monoclonal antibodies, or as a substrate for selecting aptamers, can be prepared, for example, by recombinant DNA methods. For example, the cDNA of the marker protein can be cloned into an expression vector by techniques within the skill in the art. An expression vector comprising sequences encoding the maker protein can then be transfected into an appropriate, for example bacterial, host, whereupon the protein is expressed. The expressed protein can then be isolated by any suitable technique.

[0310] For example, a marker protein of the invention can be prepared in the form of a bacterially expressed glutathione S-transferase (GST) fusion protein. Such fusion proteins can be prepared using commercially available expression systems, following standard expression protocols, e.g., “Expression and Purification of Glutathione-S-Transferase Fusion Proteins”, Supplement 10, unit 16.7, in Current Protocols in Molecular Biology (1990) and Smith and Johnson, Gene 67: 34-40 (1988); Frangioni and Neel, Anal. Biochem. 210: 179-187 (1993), the entire disclosures of which are herein incorporated by reference.

[0311] Assessment of oocyte quality may be carried out by assessing the expression level relative to a control or standard expression level of any one or more of the 24 marker genes described herein. The invention may be practiced by probing the expression level of the complete set of all 24 marker genes, or any 23, 22, 21, 20, 19, 18, 17, 16, 15, 14, 13, 21, 11, 10, 9, 8, 7, 6, 5, 4, 3, 2 or 1 thereof. Accordingly, it should be understood that this description of a range of 24 marker genes should be considered to have specifically disclosed all the possible sub-sets, as well as all individual genes within the set.

[0312] In one embodiment, the level or marker gene expression in the sample is at least 20% different from the level or marker gene expression determined for the control, or other sample forming the basis of comparison. In other embodiments, the difference is at least 40%, at least 60%, at least 80%, at least 2-fold, at least 3-fold, at least 4-fold, at least 6-fold, at least 8-fold or at least 10-fold from the control or other sample forming the basis of comparison.

[0313] In some embodiments, the expression level of at least three genes is determined. In one embodiment, the at least three genes comprise NEK6, AQP11 and IGF1. For a determination of oocyte quality, in one embodiment the probability, “P”, of a mammalian oocyte of high quality is given by the equation:

P=e^{5.608+0.645x+0.100y-2.17z}/1+e^{.}e^{5.608+0.645x+0.100y-2.17z}

[0314] wherein:

[0315] x is the expression level of NEK6 relative to a control;

[0316] y is the level of AQP11 relative to the control; and

[0317] z is the level of IGF1 relative to the control.

[0318] In other embodiments, the expression level of at least ten marker genes is determined.

[0319] In some embodiments the expression level of any 1, 2, 3, 4, 5, 6, 7, 8, 9, 10, 11, 12, or 13 of the following marker genes is determined: AQP11, CLU, CYP11A1, CYP19A1, FN1, FOSL2, GMNN, HSD17B1, HSD11B2, HSDL1, IRS1, NEK6 and SMAD7.

[0320] As demonstrated in the Example that follows, mean candidate marker gene expression values were compared between groups (IVM vs. VVM) adjusted for background using analysis of covariance on rank-transformed expression levels. Pearson correlation coefficients were calculated to evaluate the degree of colinearity and similarity among the expression levels for the various marker genes. Gene expression levels were analyzed for a relationship to oocyte quality. A single gene generalized estimating equation (GEE) was used to calculate the relationship of gene expression to oocyte quality. GEE is a special case of the generalized linear model taking into consideration the occurrence of multiple oocytes per animal in the same analysis. Odds ratios with 95% confidence intervals and P-values were calculated for each gene as each was related to oocyte quality. Univariate GEE analysis demonstrated that the expression of the 24 marker genes ACPP, AQP11, CCDC126, CLU, CYP11A1, CYP19A1, EGR3, FN1, FOSL2, GMNN, HRAS, HSD3B2, HSD17B1, HSD11B2, HSDL1, IGF1, IGFBP4, IGFBP5, IRS1, KCNK3, KLF6, NEK6, SMAD7 and STC1, were significantly related to oocyte quality. See Table 13, “Calculation of Odds Ratios”, below. For IRS 1, the homologous rhesus gene utilized was IRS4.

[0321] The odds ratios calculated for each of these 24 genes define the degree of increased or decreased quality per unit change in gene expression. The odds ratios in turn provide for the assignment, for each of the 24 marker genes, of a percent increase in oocyte quality per ACT unit. See Table 1, below. A ACT unit represents CT values, comprising the expression data from RT-PCR, normalized to an internal housekeeping mRNA. One CT unit corresponds to a two-fold difference in gene expression level. Thus, a two-fold difference in expression at either the mRNA or protein level measured by any method would thus reflect a difference in probability of a quality oocyte according to the stated odds ratios.

TABLE 1
Oocyte Quality Odd Ratios

| | | % increase in oocyte |
|---|---|---|
| Gene | Odds ratio | quality per ΔCt unit |
| NEK6 | 1.1926 | 19.26 |
| AQP11 | 1.6286 | 62.86 |
| CCDC126 | 0.8617 | −13.83 |
| KLF6 | 0.7999 | −20.01 |
| ACPP | 0.1608 | −83.92 |
| EGR3 | 0.9108 | −8.92 |
| IGFBP4 | 2.0730 | 107.30 |
| IGF1 | 0.6059 | −39.41 |
| IRS1¹ | 0.3441 | −65.59 |
| FOSL2 | 0.9602 | −3.98 |
| HRAS | 1.1737 | 17.37 |
| CLU | 1.7654 | 76.54 |
| FN1 | 1.1019 | 10.19 |
| HSD17B1 | 2.5095 | 150.95 |
| HSDL1 | 1.1458 | 14.58 |
| HSD11B2 | 1.0912 | 9.12 |
| STC1 | 2.0346 | 103.46 |
| CYP11A1 | 1.1679 | 16.79 |
| GMNN | 1.1579 | 15.79 |
| HSD3B2 | 1.9117 | 91.17 |
| CYP19A1 | 11.2211 | 1022.11 |
| IGFBP5 | 1.0287 | 2.87 |
| KCNK3 | 1.0002 | 0.02 |
| SMAD7 | 1.0329 | 3.29 |

¹Based on the result for the rheses genes IRS4, which is homologous to the human IRS1 gene.

[0322] Thus, for each unit of change in ΔCt value, the odds of an oocyte being a quality oocyte increased or decreases according to the odds ratio corresponding to the maker gene. This allows oocytes in a group to be compared to each other in order to select the oocyte(s) of highest relative quality. This also allows comparison of oocytes to a reference sample of known quality in order to judge the quality of the oocytes. In either case, the oocyte quality demonstration provides a probability of the oocyte possessing a desired development potential.

[0323] As an example, the data in Table 1 is utilized as follows to determine the relative quality of an oocyte. As between two oocytes differing by one CT unit of NEK6 expression, i.e., a two fold difference in NEK6 expression level, the oocyte with the 2-fold higher level of expression (lower ΔCt) will have a 19.26% lower probability of being a high quality oocyte than the oocyte with the lower NEK6 expression level (higher ΔCt). As between two oocytes differing in NEK6 expression by two CT units, the oocyte characterized by the higher NEK6 expression level (lower ΔCt) will have a 38.52% (19.26%×2) probability of being a lower quality oocyte for developmental purposes than the oocyte characterized by the lower NEK6 expression level (higher ΔCt).

[0324] It may be appreciated from a consideration of Table 1 that expression of the marker genes AQP11, CLU, CYP11A1, CYP19A1, FN1, GMNN, HRAS, HSD3B2, HSD17B1, HSD11B2, HSDL1, IGFBP4, IGFBP5, KCNK3, NEK6, SMAD7 and STC1 correlates negatively with oocyte quality, that is, higher expression (lower ΔCt) is indicative of reduced oocyte quality. It may be also appreciated from Table 1 that expression of the marker genes ACPP CCDC126 EGR3, FOSL2, IGF1, IRS1 (based on the result for the homologous rhesus gene IRS4) and KLF6 correlates positively with oocyte quality, that is, higher expression (lower ΔCt) is indicative of increased oocyte quality. Any difference in expression level of a marker may be translated into a corresponding value for relative oocyte quality using the data of Table 1. However, it may be further appreciated that the greater the magnitude of the expression difference in a marker gene as between two oocytes, the larger is the probability that the oocytes will differ in quality.

[0325] In certain embodiments, the marker gene is selected from the marker genes characterized by a P-value of less than 0.01 in odds ratio determination of oocyte quality. Those marker genes include: AQP11, CLU, CYP11A1, CYP19A1, FN1, FOSL2, GMNN, HSD17B1, HSD11B2, HSDL1, IRS1, NEK6 and SMAD7. In some embodiments the expression level of any 1, 2, 3, 4, 5, 6, 7, 8, 9, 10, 11, 12, or 13 of the aforementioned marker genes is determined.

[0326] Differences in marker gene expression in cumulus cells or granulosa cells associated with a given oocyte, compared to the expression level of cumulus or granulosa cells associated with other oocytes in a group, permits ranking of oocytes in a group of oocytes according to relative quality. Thus, in one embodiment of the invention, a plurality of oocytes from an individual, or group of individuals, are grouped and screened in a single assay; the oocytes characterized with the highest quality probability scores are then selected for fertilization and/or implantation.

[0327] In another embodiment of the invention, a test group comprising one or more oocytes for quality probability determination includes one or more reference oocytes of known quality (high or low), and the relative probability of quality for the test oocytes is determined with reference to the control oocyte, applying the relevant percent increase in oocyte quality per ΔCt value from Table 1. Selection of an oocyte characterized by a known quality can be accomplished by several means. Oocytes matured in vivo are of higher quality than those matured in vitro. Oocytes in some species are of differing quality based on time of year (highest quality during breeding season). Oocytes have lower quality with advancing maternal age. Oocyte quality can be reduced in certain genetic mutants. Oocyte quality can be reduced by maternal exposure to a variety of agents. Oocyte quality can be compromised by various in vitro treatments. Oocytes that are grown in vitro from early follicular stages and then matured can be of lower quality. Oocytes that support fertilization, onset of cleavage, faster cleavage rates of embryos, quality blastocyst formation, or term development are of higher quality than those that failed to do so. The cumulus cells from all such classes of oocytes can be used as high- and low-quality reference standards. Synthetic references can also be created by combination of target marker gene sequences or by the in vitro amplification of whole transcriptome cDNA libraries from cumulus cells associated with high or low quality oocytes.

[0328] The availability of the panel of marker genes provides for the screening and identification of high or low quality oocytes. The relative expression of any one or combination of marker genes in a cumulus cell or granulosa cell may thus be used to determine the quality of an associated oocyte. These marker genes of the invention can be adopted into a readily applicable PCR-based or protein expression-based assay that may be applied to small clumps of cumulus cells or granulosa cells isolated from individual COCs. The assay would be applicable to human assisted reproduction clinic operations for identifying high quality oocytes for assisted reproduction. This would allow clinical selection of the highest quality oocytes in situations that require fertilized embryos to be transferred, and provide an invaluable means of evaluating oocyte quality after in vitro oocyte culture and IVM, for example in the context of oncofertility programs (Woodruff et al., (2010), Nat Rev. Gin Oncol 7:466-475) or efforts to manipulate GV stage oocytes in emerging assisted reproduction methods involving microsurgery (Li et al., (2001) Mol Reprod Dev 58:180-185; Liu et al., (1999) Hum Reprod 14:2357-2361; Takeuchi et al., (2004) Hum Reprod 19:975-981; Tucker et al., (1998) Hum Reprod 13:3156-3159).

[0329] The assay method of the invention also has application to optimizing reproductive biology approaches to enhance production of valuable agricultural species, and in assisted reproduction methods for livestock production in particular.

[0330] The assay method of the invention also has application in the assisted reproduction of endangered species, for endangered species preservation.

[0331] The assay method of the invention also has application in selection of oocytes for therapeutic cloning.

[0332] The assay method of the invention can be used in one application as a research tool to improve IVM conditions, through selection of conditions which yield a marker gene expression profile in cumulus cells and/or granulosa cells that reflect a high quality oocyte. Conversely, conditions that result in a profile indicative of providing a low quality oocyte may be avoided.

[0333] While the practice of the present invention has been exemplified using rhesus monkeys, the utility of the invention is not so limited, and extends to determination of oocyte quality in other mammalian species as well, as the marker genes of the invention are evolutionarily conserved and exhibit homology across species. GenBank accession reference numbers for the nucleotide (mRNA) and encoded amino acid sequences of each of the 24 rhesus monkey marker genes is listed in Table 2. The rhesus monkey gene homologus to human IRS 1, (located on human chromosome 2q2) is IRS4. Rhesus monkey gene IRS4 is located on chromosome 12. GenBank accession reference numbers for the homologous human, cattle, mouse and rat sequences are provided in Tables 3, 4, 5 and 6, respectively. Selected homologous marker gene sequences are provided for pig (Table 7) and sheep (Table 8). The nucleotide and amino acid sequence information referenced under the listed GenBank accession numbers is incorporated herein by reference. Where a marker gene exists in more than one known genotype or isoform, the multiple variants are provided. Based on the information in Table 1, and the corresponding known nucleotide and amino acid sequence information for homologous genes in other species (readily obtainable from public sources, e.g., GenBank), the skilled artisan may utilize one or more of the set of 24 marker genes in assessing oocyte quality across mammalian species.

TABLE 2
Rhesus Monkey (Macaca Mulata) Marker Genes

| Gene | Gene ID | Protein ID | mRNA ID |
|---|---|---|---|
| NEK6 | 100427402 | XP_002800024.1 | XM_002799978.1 |
| NEK6 | 100427402 | XP_002800025.1 | XM_002799979.1 |
| AQP11 | 698835 | XP_001090652.1 | XM_001090652.2 |
| CCDC126 | 710357 | NP_001177873.1 | NM_001190944.1 |
| KLF6 | 710784 | XP_001102983.2 | XM_001102983.2 |
| ACPP | 717786 | XP_001115549.1 | XM_001115549.2 |
| IGFBP4 | 700963 | XP_001097914.1 | XM_001097914.2 |
| IGF1 | 698444 | XP_001094251.1 | XM_001094251.2 |
| IGF1 | 698444 | XP_001094016.1 | XM_001094016.2 |
| IGF1 | 698444 | XP_001094129.1 | XM_001094129.2 |
| IRS4 | 707870 | XP_001109882.1 | XM_001109882.2 |
| (homologous to | | | |
| human IRS1) | | | |
| FOSL2 | 703068 | XP_001101118.1 | XM_001101118.2 |
| FOSL2 | 703068 | XP_001101026.1 | XM_001101026.2 |
| HRAS | 698830 | XP_001085804.1 | XM_001085804.2 |
| CLU | 677866 | NP_001182403.1 | NM_001195474.1 |
| HSD17B1 | 710392 | NP_001040597.1 | NM_001047132.1 |
| HSDL1 | 714962 | NP_001181480.1 | NM_001194551.1 |
| HSD11B2 | 574396 | XP_001088119.2 | XM_001088119.2 |
| STC1 | 710782 | XP_001106526.1 | XM_001106526..2 |
| CYP11A1 | 708065 | XP_001096506.2 | XM_001096506.2 |
| GMNN | 708416 | XP_001101599.1 | XM_001101599.2 |
| GMNN | 708416 | XP_002803675.1 | XM_002803629.1 |
| GMNN | 708416 | XP_001101696.1 | XM_001101696.2 |
| GMNN | 708416 | XP_002803676.1 | XM_002803630.1 |
| HSD3B2 | 712686 | XP_001113717.1 | XM_001113717.1 |
| HSD3B2 | 712686 | XP_001113769.1 | XM_001113769.1 |
| HSD3B2 | 712686 | XP_001113744.1 | XM_001113744.1 |
| HSD3B2 | 712686 | XP_002801772.1 | XM_002801726.1 |
| HSD3B2 | 712686 | XP_002801771.1 | XM_002801725.1 |
| CYP19A1 | 678697 | XP_001082665.2 | XM_001082665.2 |
| IGFBP5 | 696339 | XP_001087664.1 | XM_001087664.1 |
| IGFBP5 | 696339 | XP_001087426.1 | XM_001087426.1 |
| KCNK3 | 699287 | XP_001087754.1 | XM_001087754.2 |
| SMAD7 | 698338 | XP_001087560.1 | XM_001087560.2 |
| EGR3 | 709145 | XP_001104840.2 | XM_001104840.2 |
| EGR3 | 709145 | XP_002805331.1 | XM_002805285.1 |
| FN1 | 613269 | XP_001083548.2 | XM_001083548.2 |

TABLE 3
Homo Sapiens Marker Genes

| Gene | Gene ID | Protein ID | SEQ ID NO. | mRNA ID | SEQ ID NO. |
|---|---|---|---|---|---|
| NEK6 | 10783 | NP_001138473.1 | 74 | NM_001145001.2 | 73 |
| NEK6 | 10783 | NP_001159639.1 | 76 | NM_001166167.1 | 75 |
| NEK6 | 10783 | NP_001159640.1 | 78 | NM_001166168.1 | 77 |
| NEK6 | 10783 | NP_001159641.1 | 80 | NM_001166169.1 | 79 |
| NEK6 | 10783 | NP_001159642.1 | 82 | NM_001166170.1 | 81 |
| NEK6 | 10783 | NP_001159643.1 | 84 | NM_001166171.1 | 83 |
| NEK6 | 10783 | NP_055212.2 | 86 | NM_014397.5 | 85 |
| AQP11 | 282679 | NP_766627.1 | 88 | NM_173039.2 | 87 |
| CCDC126 | 90693 | NP_620126.2 | 90 | NM_138771.3 | 89 |
| KLF6 | 1316 | NP_001153596.1 | 92 | NM_001160124.1 | 91 |
| KLF6 | 1316 | NP_001153597.1 | 94 | NM_001160125.1 | 93 |
| KLF6 | 1316 | NP_001291.3 | 96 | NM_001300.5 | 95 |
| ACPP | 55 | NP_001127666.1 | 100 | NM_001134194.1 | 99 |
| ACPP | 55 | NP_001090.2 | 98 | NM_001099.4 | 97 |
| IGFBP4 | 3487 | NP_001543.2 | 102 | NM_001552.2 | 101 |
| IGF1 | 3479 | NP_000609.1 | 104 | NM_000618.3 | 103 |
| IGF1 | 3479 | NP_001104753.1 | 106 | NM_001111283.1 | 105 |
| IGF1 | 3479 | NP_001104754.1 | 108 | NM_001111284.1 | 107 |
| IGF1 | 3479 | NP_001104755.1 | 110 | NM_001111285.1 | 109 |
| IRS1 | 3667 | NP_005535.1 | 112 | NM_005544.2 | 111 |
| FOSL2 | 2355 | NP_005244.1 | 114 | NM_005253.3 | 113 |
| HRAS | 3265 | NP_001123914.1 | 116 | NM_001130442.1 | 115 |
| HRAS | 3265 | NP_005334.1 | 118 | NM_005343.2 | 117 |
| HRAS | 3265 | NP_789765.1 | 120 | NM_176795.3 | 119 |
| CLU | 1191 | NP_001164609.1 | 122 | NM_001171138.1 | 121 |
| CLU | 1191 | NP_001822.2 | 124 | NM_001831.2 | 123 |
| CLU | 1191 | NP_976084.1 | 126 | NM_203339.1 | 125 |
| HSD17B1 | 3292 | NP_000404.2 | 128 | NM_000413.2 | 127 |
| HSDL1 | 83693 | NP_001139523.1 | 130 | NM_001146051.1 | 129 |
| HSDL1 | 83693 | NP_113651.4 | 132 | NM_031463.4 | 131 |
| HSD11B2 | 3291 | NP_000187.3 | 134 | NM_000196.3 | 133 |
| STC1 | 6781 | NP_003146.1 | 136 | NM_003155.2 | 135 |
| CYP11A1 | 1583 | NP_000772.2 | 138 | NM_000781.2 | 137 |
| CYP11A1 | 1583 | NP_001093243.1 | 140 | NM_001099773.1 | 139 |
| GMNN | 51053 | NP_056979.1 | 142 | NM_015895.3 | 141 |
| HSD3B2 | 3284 | NP_000189.1 | 144 | NM_000198.3 | 143 |
| HSD3B2 | 3284 | NP_001159592.1 | 146 | NM_001166120.1 | 145 |
| CYP19A1 | 1588 | NP_000094.2 | 148 | NM_000103.3 | 147 |
| CYP19A1 | 1588 | NP_112503.1 | 150 | NM_031226.2 | 149 |
| IGFBP5 | 3488 | NP_000590.1 | 152 | NM_000599.3 | 151 |
| KCNK3 | 3777 | NP_002237.1 | 154 | NM_002246.2 | 153 |
| SMAD7 | 4092 | NP_001177750.1 | 156 | NM_001190821.1 | 155 |
| SMAD7 | 4092 | NP_001177751.1 | 158 | NM_001190822.1 | 157 |
| SMAD7 | 4092 | NP_001177752.1 | 160 | NM_001190823.1 | 159 |
| SMAD7 | 4092 | NP_005895.1 | 162 | NM_005904.3 | 161 |
| EGR3 | 1960 | NP_001186809.1 | 164 | NM_001199880.1 | 163 |
| EGR3 | 1960 | NP_001186810.1 | 166 | NM_001199881.1 | 165 |
| EGR3 | 1960 | NP_004421.2 | 168 | NM_004430.2 | 167 |
| FN1 | 2335 | NP_002017.1 | 170 | NM_002026.2 | 169 |
| FN1 | 2335 | NP_473375.2 | 172 | NM_054034.2 | 171 |
| FN1 | 2335 | NP_997639.1 | 174 | NM_212474.1 | 173 |
| FN1 | 2335 | NP_997641.1 | 176 | NM_212476.1 | 175 |
| FN1 | 2335 | NP_997643.1 | 178 | NM_212478.1 | 177 |
| FN1 | 2335 | NP_997647.1 | 180 | NM_212482.1 | 179 |

TABLE 4
Cattle (Bos Taurus) Marker Genes

| Gene | Gene ID | Protein ID | SEQ ID NO. | mRNA ID | SEQ ID NO. |
|---|---|---|---|---|---|
| NEK6 | 515816 | NP_001092458.1 | 182 | NM_001098988.1 | 181 |
| AQP11 | 510038 | NP_001103539.1 | 184 | NM_001110069.1 | 183 |
| CCDC126 | 782956 | NP_001075941.1 | 186 | NM_001082472.2 | 185 |
| KLF6 | 505884 | NP_001030348.2 | 188 | NM_001035271.2 | 187 |
| ACPP | 504700 | NP_001092336.1 | 190 | NM_001098866.1 | 189 |
| IGFBP4 | 282262 | NP_776982.1 | 192 | NM_174557.3 | 191 |
| IGF1 | 281239 | NP_001071296.1 | 194 | NM_001077828.1 | 193 |
| IRS1 | 538598 | XP_581382.2 | 196 | XM_581382.3 | 195 |
| IRS1 | 538598 | XP_002685688.1 | 198 | XM_002685642.1 | 197 |
| FOSL2 | 509889 | NP_001179879.1 | 200 | NM_001192950.1 | 199 |
| FOSL2 | 509889 | XP_002691497.1 | 202 | XM_002691451.1 | 201 |
| HRAS | 513012 | XP_590626.2 | 204 | XM_590626.2 | 203 |
| HRAS | 513012 | XP_879748.1 | 206 | XM_874655.1 | 205 |
| HRAS | 513012 | XP_879663.1 | 208 | XM_874570.1 | 207 |
| CLU | 280750 | NP_776327.1 | 210 | NM_173902.2 | 209 |
| HSD17B1 | 785989 | XP_001253408.1 | 212 | XM_001253407.1 | 211 |
| HSD17B1 | 353107 | NP_001095835.1 | 214 | NM_001102365.1 | 213 |
| HSDL1 | 505213 | NP_001092341.1 | 216 | NM_001098871.1 | 215 |
| HSD11B2 | 282434 | NP_777067.1 | 218 | NM_174642.1 | 217 |
| STC1 | 338078 | NP_788842.2 | 220 | NM_176669.3 | 219 |
| CYP11A1 | 338048 | NP_788817.1 | 222 | NM_176644.2 | 221 |
| GMNN | 526377 | NP_001020508.1 | 224 | NM_001025337.1 | 223 |
| CYP19A1 | 281740 | NP_776730.1 | 226 | NM_174305.1 | 225 |
| IGFBP5 | 404185 | NP_001098797.1 | 228 | NM_001105327.1 | 227 |
| KCNK3 | 519188 | XP_597401.4 | 230 | XM_597401.5 | 229 |
| KCNK3 | 519188 | XP_002691504.1 | 232 | XM_002691458.1 | 231 |
| SMAD7 | 535916 | NP_001179794.1 | 234 | NM_001192865.1 | 233 |
| SMAD7 | 535916 | XP_002697809.1 | 236 | XM_002697763.1 | 235 |
| SMAD7 | 535916 | XP_616030.3 | 238 | XM_616030.3 | 237 |
| EGR3 | 526233 | XP_604596.4 | 240 | XM_604596.5 | 239 |
| EGR3 | 526233 | XP_002689819.1 | 242 | XM_002689773.1 | 241 |
| FN1 | 280794 | NP_001157250.1 | 244 | NM_001163778.1 | 243 |

TABLE 5
Mouse (Mus Musculus) Marker Genes

| Gene | Gene ID | Protein ID | mRNA ID |
|---|---|---|---|
| NEK6 | 59126 | NP_001153103.1 | NM_001159631.1 |
| NEK6 | 59126 | NP_067619.1 | NM_021606.3 |
| AQP11 | 66333 | NP_780314.1 | NM_175105.3 |
| CCDC126 | 57895 | NP_780307.1 | NM_175098.5 |
| KLF6 | 23849 | NP_035933.2 | NM_011803.2 |
| ACPP | 56318 | NP_062781.2 | NM_019807.2 |
| ACPP | 56318 | NP_997551.1 | NM_207668.2 |
| IGFBP4 | 16010 | NP_034647.1 | NM_010517.3 |
| IGF1 | 16000 | NP_001104744.1 | NM_001111274.1 |
| IGF1 | 16000 | NP_001104745.1 | NM_001111275.1 |
| IGF1 | 16000 | NP_001104745.1 | NM_001111275.1 |
| IGF1 | 16000 | NP_034642.2 | NM_010512.4 |
| IGF1 | 16000 | NP_908941.1 | NM_184052.3 |
| IRS1 | 16367 | NP_034700.2 | NM_010570.4 |
| FOSL2 | 14284 | NP_032063.2 | NM_008037.4 |
| HRAS | 15461 | NP_001123915.1 | NM_001130443.1 |
| HRAS | 15461 | NP_001123916.1 | NM_001130444.1 |
| HRAS | 15461 | NP_032310.2 | NM_008284.2 |
| CLU | 12759 | NP_038520.2 | NM_013492.2 |
| HSD17B1 | 15485 | NP_034605.1 | NM_010475.1 |
| HSDL1 | 72552 | NP_780394.1 | NM_175185.4 |
| HSD11B2 | 15484 | NP_032315.2 | NM_008289.2 |
| STC1 | 20855 | NP_033311.3 | NM_009285.3 |
| CYP11A1 | 13070 | NP_062753.3 | NM_019779.3 |
| GMNN | 57441 | NP_065592.1 | NM_020567.2 |
| HSD3B2 | 15493 | NP_694873.1 | NM_153193.3 |
| HSD3B1 | 15492 | NP_032319.1 | NM_008293.3 |
| CYP19A1 | 13075 | NP_031836.1 | NM_007810.3 |
| IGFBP5 | 16011 | NP_034648.2 | NM_010518.2 |
| KCNK3 | 16527 | NP_034738.1 | NM_010608.2 |
| SMAD7 | 17131 | NP_001036125.1 | NM_001042660.1 |
| EGR3 | 13655 | NP_061251.1 | NM_018781.2 |
| FN1 | 14268 | NP_034363.1 | NM_010233.1 |

TABLE 6
Rat (Rattus Norvegicus) Marker Genes

| Gene | Gene ID | Protein ID | mRNA ID |
|---|---|---|---|
| NEK6 | 360161 | NP_891998.1 | NM_182953.1 |
| AQP11 | 286758 | NP_775128.1 | NM_173105.1 |
| CCDC126 | 500117 | NP_001102702.1 | NM_001109232.2 |
| KLF6 | 58954 | NP_113830.1 | NM_031642.2 |
| ACPP | 56780 | NP_001128373.1 | NM_001134901.1 |
| ACPP | 56780 | NP_064457.1 | NM_020072.1 |
| IGFBP4 | 360622 | NP_001004274.1 | NM_001004274.2 |
| IGF1 | 24482 | NP_001075947.1 | NM_001082478.1 |
| IGF1 | 24482 | NP_001075948.1 | NM_001082479.1 |
| IGF1 | 24482 | NP_001075946.2 | NM_001082477.2 |
| IGF1 | 24482 | NP_849197.3 | NM_178866.4 |
| IRS1 | 25467 | NP_037101.1 | NM_012969.1 |
| FOSL2 | 25446 | NP_037086.1 | NM_012954.1 |
| HRAS | 293621 | NP_001091711.1 | NM_001098241.1 |
| HRAS | 293621 | NP_001123913.1 | NM_001130441.1 |
| CLU | 24854 | NP_444180.2 | NM_053021.2 |
| HSD17B1 | 25322 | NP_036983.1 | NM_012851.1 |
| HSDL1 | 361418 | NP_001020067.1 | NM_001024896.1 |
| HSD11B2 | 25117 | NP_058777.1 | NM_017081.1 |
| STC1 | 81801 | NP_112385.1 | NM_031123.2 |
| CYP11A1 | 29680 | NP_058982.1 | NM_017286.2 |
| GMNN | 291137 | NP_001099582.1 | NM_001106112.1 |
| HSD3B2 | 682974 | NP_001036084.1 | NM_001042619.1 |
| HSD3B1 | 360348 | NP_001007720.3 | NM_001007719.3 |
| HSD3B6 | 29632 | NP_058961.4 | NM_017265.4 |
| CYP19A1 | 25147 | NP_058781.2 | NM_017085.2 |
| IGFBP5 | 25285 | NP_036949.1 | NM_012817.1 |
| KCNK3 | 29553 | NP_203694.1 | NM_033376.1 |
| SMAD7 | 81516 | NP_110485.1 | NM_030858.1 |
| EGR3 | 25148 | NP_058782.1 | NM_017086.1 |
| FN1 | 25661 | NP_062016.2 | NM_019143.2 |

TABLE 7
Selected Marker Genes from Pig (Sus Scrofa)

| Gene | Gene ID | Protein ID | SEQ ID NO. | mRNA ID | SEQ ID NO. |
|---|---|---|---|---|---|
| KLF6 | 100174961 | NP_001127825.1 | 246 | NM_001134353.2 | 245 |
| IGFBP4 | 100144490 | NP_001116601.1 | 248 | NM_001123129.1 | 247 |
| IGF1 | 397491 | NP_999421.1 | 250 | NM_214256.1 | 249 |
| HRAS | 733587 | NP_001038002.1 | 252 | NM_001044537.1 | 251 |
| CLU | 397025 | NP_999136.1 | 254 | NM_213971.1 | 253 |
| HSD17B1 | 100147712 | NP_001121944.1 | 256 | NM_001128472.1 | 255 |
| HSD11B2 | 396948 | NP_999078.1 | 258 | NM_213913.1 | 257 |
| STC1 | 100125345 | NP_001096682.1 | 260 | NM_001103212.1 | 259 |
| CYP11A1 | 403329 | NP_999592.1 | 262 | NM_214427.1 | 261 |
| CYP19A1 | 403331 | NP_999594.1 | 264 | NM_214429.1 | 263 |
| IGFBP5 | 397182 | NP_999264.1 | 266 | NM_214099.1 | 265 |
| SMAD7 | 100157769 | XP_001927617.1 | 268 | XM_001927582.1 | 267 |
| ACPP | 100302507 | XP_003132467.1 | 270 | XM_003132419.1 | 269 |
| IRS1 | 100294708 | ACG59405.1 | 272 | EU681268.1 | 271 |
| EGR3 | 100516296 | XP_003132855.1 | 274 | XM_003132807.1 | 273 |
| FN1 | 397620 | XP_003133689.1 | 276 | XM_003133641.1 | 275 |
| FN1 | 397620 | XP_003133690.1 | 278 | XM_003133642.1 | 277 |
| FN1 | 397620 | XP_003133691.1 | 280 | XM_003133643.1 | 279 |

TABLE 8
Selected Marker Genes from Sheep (Ovis Aries)

| Gene | Gene ID | Protein ID | mRNA ID |
|---|---|---|---|
| IGFBP4 | 443470 | NP_001127774.1 | NM_001134302.1 |
| IGF1 | 443318 | NP_001009774.1 | NM_001009774.2 |
| HSD11B2 | 443530 | NP_001009460.1 | NM_001009460.1 |
| CYP11A1 | 100048994 | NP_001087258.1 | NM_001093789.1 |
| CYP19A1 | 100144423 | NP_001116472.1 | NM_001123000.1 |
| IGFBP5 | 443133 | NP_001123205.1 | NM_001129733.1 |
| KCNK3 | 100141302 | NP_001186719.1 | NM_001199790.1 |
| SMAD7 | 443160 | AAL30899.1 | AF436855.1 |
| FN1 | 100216462 | ACJ24822.1 | FJ234417.1 |
| STC1 | 100294584 | UNREPORTED | UNREPORTED |

[0334] The practice of the invention is readily adapted to kit form. The identification of the 24 markers and the determination of the association between change in marker gene expression in cumulus cells and attendant oocyte quality provides the basis for clinical diagnostic kits based on either mRNA or protein expression.

[0335] Basic materials and reagents required for determination of oocyte quality according to the invention may be assembled in a kit. In certain embodiments, the kit comprises at least one reagent that specifically detects expression levels of at least one gene selected from the 24 marker genes disclosed herein, and instructions for using the kit according to one or more methods of the invention. Each kit necessarily comprises reagents which render the procedure specific. Thus, for detecting mRNA expressed by at least one marker gene of the set, the reagent will comprise a nucleic acid probe complementary to mRNA, such as, for example, a cDNA or an oligonucleotide. The nucleic acid probe may or may not be immobilized on a substrate surface (e.g., a microarray). For detecting a polypeptide product encoded by at least one gene of the set, the reagent will comprise an antibody that specifically binds to the polypeptide.

[0336] Depending on the procedure, the kit may further comprise one or more of: extraction buffer and/or reagents, amplification buffer and/or reagents, hybridization buffer and/or reagents, immunodetection buffer and/or reagents, labeling buffer and/or reagents, and detection means. Protocols for using these buffers and reagents for performing different steps of the procedure may also be included in the kit.

[0337] Reagents may be supplied in a solid (e.g., lyophilized) or liquid form. Kits of the present invention may optionally comprise different containers (e.g., vial, ampoule, test tube, flask or bottle) for each individual buffer and/or reagent. Each component will generally be suitable as aliquoted in its respective container or provided in a concentrated form. Other containers suitable for conducting certain steps for the disclosed methods may also be provided. In certain embodiments, the kits of the present invention further comprise control samples.

[0338] Instructions for using the kit according to one or more methods of the invention may comprise instructions for processing the cumulus cell or granulosa cells samples, and/or performing the test, and instructions for interpreting the results.

[0339] In one embodiment, a kit for determining mRNA expression of marker genes by quantitative RT-PCR would include standard primers and other reagents for performing quantitative RT-PCR, with reaction components formulated for optimized success in detection for each gene to be assayed. The amplification primers may be selected based on the nucleotide sequence of the relevant marker gene(s), depending on the species of mammalian oocyte being assessed. Any single or combination of the 24 markers genes could be incorporated into the kit. To provide users options to choose balance between coverage and cost, different kits could provide different collections of primers for the marker genes targeted for analysis.

[0340] Also a kit for determining mRNA expression of marker genes would advantageously further contain primers for a suitable constitutively expressed mRNA to serve as an internal standard (e.g., histone H2A or mitochondrial ribosomal protein S18C gene). A kit may further optionally contain a control cDNA mixture to serve as a positive control, a control cDNA library for confirming detection and signal intensities within acceptable parameters. A kit may yet further optionally contain control cDNA libraries representing cumulus cells from high and low quality oocytes, or synthetic mixtures and amounts of marker and control cDNAs that mimic the molar amounts of targets in such libraries.

[0341] The molecular kit would include instructional material that informs the user of relationship between expression level and oocyte quality, such as a package insert comprising the odds ratios and/or % increase in oocyte quality per ΔCt unit of Table 1. The instructional material may comprise a publication, a recording, a diagram, or any other medium of expression which can be used to communicate the usefulness of the method of the invention in the kit for assessment of oocyte quality. The package insert may comprise text housed in any physical medium, e.g., paper, cardboard, film, or may be housed in an electronic medium such as a diskette, chip, memory stick or other electronic storage form. The instructional material of the kit of the invention may, for example, be affixed to a container which contains other contents of the kit, or be shipped together with a container which contains the kit. Alternatively, the instructional material may be shipped separately from the container with the intention that the instructional material and the contents of the kit be used cooperatively by the recipient.

[0342] A compatible qRT-PCR instrumentation platform may be provided, equipped with a user interface in which the sample information is input for each run (including controls) and the output is a report of CT values, normalized CT values, and relative change in oocyte quality from controls or between oocytes in a population from an individual patient based on automated calculations using marker expression values and odds ratios for each marker assayed.

[0343] In another embodiment, a kit for determining expressed protein levels of marker genes is provided. Such kits can comprise an appropriate set of reagents that bind to the marker proteins of the invention. For example, for each maker protein, the kit can comprise an antibody, an antibody derivative, or an antibody fragment that binds specifically with the marker protein.

[0344] For antibody-based kits, the kit can comprise, for example: (1) a first antibody (e.g., attached to a solid support) that binds to a marker protein; and, optionally, (2) a second, different antibody that binds to either the protein or the first antibody and is conjugated to a detectable label. The kit can further comprise components necessary for detecting the detectable label (e.g., an enzyme or a substrate), and instrumentation for detection and measurement. A kit may further optionally contain aliquots of known amounts of maker protein to serve as reference standards, or reference samples representing marker protein from cumulus cells of high and low quality oocytes.

[0345] The kit for determination of marker protein expression may further contain a package insert that informs the user of the relationship between expression level and oocyte quality, such as a package insert comprising the odds ratios and/or % increase in oocyte quality per ΔCt unit of Table 1.

[0346] In addition to the specific biomarker sequences identified herein by accession number and/or sequence, the invention also contemplates the detection in a test sample of variants that are at least 90%, at least 95%, at least 96%, at least 97%, at least 98%, or at least 99% identical to those exemplified biomarker sequences.

[0347] The determination of percent identity between two nucleotide or amino acid sequences (“sequence identity”) can be accomplished using a mathematical algorithm. For example, a mathematical algorithm useful for comparing two sequences is the algorithm of Karlin and Altschul (1990, Proc. Natl. Acad. Sci. USA 87:2264-2268), modified as in Karlin and Altschul (1993, Proc. Natl. Acad. Sci. USA 90:5873-5877). This algorithm is incorporated into the NBLAST and XBLAST programs of Altschul, et al. (1990, J. Mol. Biol. 215:403-410), and can be accessed, for example at the National Center for Biotechnology Information (NCBI) world wide web site having the universal resource locator “http://blast(dot)ncbi(dot)nlm(dot)nih(dot)gov/Blast(dot)cgi”. BLAST nucleotide searches can be performed with the NBLAST program (designated “blastn” at the NCBI web site), using the following parameters: gap penalty=5; gap extension penalty=2; mismatch penalty=3; match reward=1; expectation value 10.0; and word size=11 to obtain nucleotide sequences homologous to a nucleic acid described herein. BLAST protein searches can be performed with the XBLAST program (designated “blastn” at the NCBI web site) or the NCBI “blastp” program, using the following parameters: expectation value 10.0, BLOSUM62 scoring matrix to obtain amino acid sequences homologous to a protein molecule described herein. To obtain gapped alignments for comparison purposes, Gapped BLAST can be utilized as described in Altschul et al. (1997, Nucleic Acids Res. 25:3389-3402). Alternatively, PSI-Blast or PHI-Blast can be used to perform an iterated search which detects distant relationships between molecules (Id.) and relationships between molecules which share a common pattern. When utilizing BLAST, Gapped BLAST, PSI-Blast, and PHI-Blast programs, the default parameters of the respective programs (e.g., XBLAST and NBLAT) can be used.

[0348] The practice of the invention is illustrated by the following non-limiting example. The invention should not be construed to be limited solely to the compositions and methods described herein, but should be construed to include other compositions and methods as well. One of skill in the art will know that other compositions and methods are available to perform the procedures described herein.

### EXAMPLE

### Identification of Differentially Expressed Genes

### 1. Collection and Lysis of Rhesus Cumulus Cells

[0349] Adult female rhesus macaques were housed individually with a 0600-1800 light cycle and maintained at a temperature of 25-27° C. Animals were allowed to socialize by being housed in pairs during the day from approximately 0800 to 1400. Animals were fed a diet of Purina Monkey Chow and water ad libitum and seasonal produce, seeds, and cereal were offered as supplements for environmental enrichment. Only females with a history of normal menstrual cycles were selected for study.

[0350] Females were observed daily for signs of vaginal bleeding and the first day of menses was assigned cycle day 1. Beginning on cycle day 1-4 recombinant human FSH (r-hFSH: Organon, West Orange, N.J.) was administered (37.5 IU) twice daily, intramuscularly for 7 days total. For in vitro maturation (IVM) experiments, cumulus-oocyte complexes (COCs) were collected on day 8. To obtain in vivo matured (VVM) oocytes, females were given recombinant hCG (1,000 IU Ovidrel; Serono, Rockland, Mass.) on treatment day 8 in addition to the FSH treatment outlined above. COCs were aspirated from follicles at 28-30 hours following hCG by ultrasound-guided aspiration (VandeVoort and Tarantal, (1991) J Med Primatol 20:110-116; VandeVoort and Tarantal A F, (2001) J Med Primatol 30:304-307). Oocytes were retrieved from aspirates as described (VandeVoort, et al. (2003) Theriogenology 59:699-707).

[0351] All cumulus-oocyte complexes were collected into Tyrode lactate (TL)-HEPES medium (37° C.) containing 0.1 mg/ml polyvinyl alcohol and 5 ng/ml recombinant human FSH (r-hFSH; Organon). Aspirates were immediately placed in a heated isolette (37° C.), where cumulus-oocyte complexes were retrieved from aspirates and placed in fresh TL-HEPES medium. Immature oocytes were recovered at the germinal vesicle stage and cultured for 24 h in 70-μl drops under oil in CMRL medium (Boatman and Bavister (1984) J Reprod Fertil 71:357-366) containing 10% bovine calf serum (Gem Cell, Woodland, Calif.), hFSH, hLH (0.03 IU/ml Pergonal, Ares-Serono), and 1 μg/ml androstenedione (Steraloids, Newport, R.I.) (also reported as CMRLb medium (Schramm et al., (2003) Hum Reprod 18:826-833)). Cumulus cells were obtained from IVM oocytes immediately after collection or after culture for 24 hours, and from VVM oocytes only immediately after collection. The cumulus oocyte complexes were placed individually into drops of TL-HEPES medium and cumulus cells were removed from oocytes by trituration through a small bore pipette. Only cumulus cells from oocytes that had a germinal vesicle (GV) were included in the pre-maturation IVM control group and only oocytes with one polar body were utilized for the IVM and VVM groups.

### 2. RNA Isolation, Amplification and Array Hybridization

[0352] Total RNA was isolated from cumulus cells using the PicoPure RNA isolation kit (MDS Analytical Technologies, Sunnyvale, Calif.) according to the manufacturer's instruction. Fifty ng of total RNA from each sample were subjected to two rounds of cDNA synthesis and in-vitro transcription labeling to achieve a linear amplification (Eukaryotic Small Sample Target Labeling Assay, Affymetrix GeneChip Expression Analysis Technical Manual) with minor modifications (initial 5 μl volume for annealing and reverse transcription for 30 minutes at 42° C. followed by 30 minutes at 45° C.). The biotin-labeled cRNA samples were fragmented and 10 μg were hybridized onto Affymetrix Rhesus Genome GeneChip arrays. Post-hybridization washing, staining and scanning were performed as described in the Affymetrix GeneChip Expression Analysis Technical Manual.

### 3. Microarray Data Analysis

[0353] Transcriptome profiles were generated as follows from three different groups of rhesus monkey cumulus cells using the Affymetrix Rhesus Genome arrays.

[0354] A first cumulus cell group comprised pre-maturation cumulus cells (PM-CC) from cumulus-oocyte complexes (COCs) collected and lysed on day 8 immediately after collection from females that received seven days of FSH hormone injections. A second cumulus cell group (IVM-CC) was from COCs that were collected on day 8, followed by maturation of the intact COCs in vitro for 24 hours by exposure to gonadotropin levels that are known to result in oocyte maturation and luteinization of granulosa cells (de Prada and VandeVoort, (2008) J Assist Reprod Genet 25:145-158; Chaffin et al., (2003) Endocrinology 144:1249-1256). On day 9, cumulus cells were separated from oocytes and lysed. A third group comprised in vivo matured cumulus cells (VVM-CC) obtained from COCs on day 9 from rhesus monkeys that received the seven-day FSH regimen and then an hCG dose on day 8. Thus, the only difference between the IVM and VVM cells was whether exposure to gonadotropins to stimulate final oocyte maturation occurred in vitro or in vivo during the period from day 8 to day 9.

[0355] Inspecting array data, all quality control parameters were within the acceptable ranges for all samples (data not shown). The average detection rate for PM-CC samples was 47%, corresponding to approximately 25,000 probe sets. The detection rates for IVM-CC and VVM-CC were 38% and 41%, respectively. A hierarchical clustering analysis (HCL) revealed that the biological replicates cluster to their corresponding groups without any apparent outliers (data not shown). The three-dimensional Principal Component Analysis (PCA) also showed the clustering of all replicates to their corresponding groups (data not shown).

[0356] Probe hybridization intensity data were imported into the Affymetrix Expression Console Software and summarized using the Robust Multichip Analysis (RMA) algorithm with a global background correction and a quantile normalization (Irizarry et al., (2003) Nucleic Acids Res 31:e15). To simplify and focus analysis, 1,099 genes with inconsistencies between probes sets were omitted from further consideration, and only the genes that differed in expression at the threshold of 2-fold or greater were employed for Interpretative Phenomenological Analysis (IPA). In order to minimize false detections, expression data were filtered based on Present/Absent calls determined by MAS 5.0 algorithm (Affymetrix) at the default settings (detection p-value <0.05 and tau=0.015).

[0357] Only those probe sets called ‘Present’ in all biological replicates of one of the two groups in comparison were selected for the analysis. To minimize the chance of false positives in subsequent analyses, probe sets with maximum raw intensity values <100 were removed omitted from the data set. To identify differentially expressed genes, the Significance Analysis of Microarray (SAM; Tusher et al., (2001) Proc Natl Acad Sci USA 98:5116-5121) was performed. Differentially expressed probe sets were identified at the false discovery rate (FDR) lower than 1% and the Student's t-test was used to select further for the genes with statistical significance (P<0.01).

[0358] The initial comparisons between cumulus cells obtained following in vivo or in vitro maturation of cumulus oocyte complexes revealed more than 500 mRNAs differentially regulated in cumulus cells comparing in vitro maturation (IVM) and in vivo maturation (VVM) using array data (data not shown). Based on knowledge about specific biological pathways related to the affected genes, additional mRNAs were evaluated and found to be differentially expressed as well. The 43 genes in Table 9 were then selected as candidates for markers to distinguish between cumulus cell phenotypes associated with different oocyte quality. These 43 genes were chosen based on a combination of fold change, array hybridization signal strength and biological function.

[0359] The results of the microarray data analysis for the 43 genes of Table 9 are set forth in FIG. 1, showing differences in gene expression in cumulus cells comparing in vitro and in vivo maturation (IVM and VVM) based on normalized array average raw intensity values. The ratio of expression (log2) is shown.

TABLE 9
Candidate Markers for Oocyte Quality

| | | | | |
|---|---|---|---|---|
| ACPP | AQP11 | CCBE1 | CCDC126 | CLU |
| CYP11A1 | CYP19A1 | EGR2 | EGR3 | FN1 |
| FOSB | FOSL2 | GMNN | HRAS | HSD17B1 |
| HSD11B2 | HSD3B2 | HSDL1 | IGFBP3 | IGFBP4 |
| IGFBP5 | IGFBP7 | IGF1 | IGF1R | INSR |
| IRS1¹ | IRS2 | KCNK3 | KLF6 | MYST3 |
| NEK6 | PAPPA | PPP1R14B | PTGS2 | RORA |
| SMAD7 | SERBP1 | SD11B2 | STC1 | TAF 10 |
| TGFB1 | TGFBR2 | TGFBR3. | | |

¹Based on the homologous rheses gene IRS4

4. Real Time qRT-PCR Analysis

[0360] The expression of individual mRNAs from the 43 genes in Table 9 was tested further using a quantitative real time RT-PCR assay. Each sample used for the assay represented a pool of cumulus cells obtained from cumulus-oocyte complexes of a single rhesus monkey. Nine samples of VVM and four samples of IVM cumulus cells were processed, representing nine female monkeys that had undergone stimulation for VVM and four females that had undergone stimulation for IVM. Total RNA was isolated using the PicoPure RNA isolation kit (Molecular Devices, Sunnyvale, Calif.), and subjected to a whole transcriptome amplification using the QuantiTect whole transcriptome kit (Qiagen, Valencia, Calif.). Custom TaqMan gene expression assays were designed based on rhesus cDNA sequences using Primer Express software v3.0 (Applied Biosystems, Foster City, Calif.). Quantitative real time PCR was performed on approximately 100 ng of cDNA for each sample with ABI StepOne Plus instrument according to the manufacturer's recommendations (Applied Biosystems, Foster City, Calif.). Primer sequences employed for the assays are given in Table 10 (forward) and Table 11 (reverse). Reporter sequences are provided in Table 12. The mRNA abundance of each target gene was normalized to the endogenous mitochondrial ribosomal protein S18C gene (MRPS18C) for sample-to-sample comparisons. The relative expression ratio of IVM to VVM groups was obtained by the comparative CT method (Livak and Schmittgen, (20010) Methods 25:402-408).

[0361] The results of the quantitative real time RT-PCR are set forth in FIG. 2, showing the differences in gene expression in cumulus cells comparing in vitro and in vivo maturation (IVM and VVM). The ratio of expression (log2) after normalization to the internal standard is shown.

TABLE 10
qRT-PCR Forward Primer Sequences

| Genes | Forward Primer Seq. | SEQ ID NO: |
|---|---|---|
| NEK6 | GGAAGGATGGGATGTAAAAAAGCT | 1 |
| AQP11 | GGAAGCCGCCTTATAGTTTTCA | 2 |
| CCDC126 | CCAAATCTCTGTTCTCTTCTGTGTACTC | 3 |
| KLF6 | TGGCTGGGCTGGTATTTTGT | 4 |
| ACPP | AAGCCACCCCCGTTCCT | 5 |
| EGR3 | AAAGCAACAAAAGAAAATGCACTCT | 6 |
| IGFBP4 | TGGACTGAATGTGCCTAATGGA | 7 |
| IGF1 | GCAGCGCCGCATCAG | 8 |
| IRS4¹ | TTGGCAATTGAATGGAAGCA | 9 |
| FOSL2 | CCCAAGACCTGGCGTGAT | 10 |
| HRAS | GGAAGCTGAACCCTCCTGATG | 11 |
| CLU | GGTGTCCCAGCTGGCAAA | 12 |
| FN1 | GCCTGTTCTGCTTCAAAGTATTCA | 13 |
| HSD17B1 | GGGCTACCCTTCAATGACGTT | 14 |
| HSDL1 | GGAGGCTGAGGCAGGAGAAT | 15 |
| HSD11B2 | AGGCCAAGGTTTCCCAGTGT | 16 |
| STC1 | AGTTCTTTACTCGTCCCCTTTCATC | 17 |
| CYP11A1 | GGCACCACATTCAACCTCATC | 18 |
| GMNN | TGTTGAGAATTTTACTGCCGAAGT | 19 |
| HSD3B2 | TGGCCCAACCAGAAGCTTT | 20 |
| CYP19A1 | CTCTTAAAGAATGTTTTGGTCTCCATT | 21 |
| IGFBP5 | GGGTGAACAATTTTGTGGCTATTT | 22 |
| KCNK3 | TGTGCTGGCCACTGATTCC | 23 |
| SMAD7 | CAAGAAGGATTTGGTCCGTCATA | 24 |

¹IRS4 is the rhesus homolog of the human gene IRS1.

TABLE 11
qRT-PCR Reverse Primer Sequences

| Gene | Reverse Primer Seq. | SEQ ID NO. |
|---|---|---|
| NEK6 | CGCTAGGAAGTTGCAGAACCA | 25 |
| AQP11 | GGATGCCTCATTTTCACAGTAATTT | 26 |
| CCDC126 | AACTTCTACCTGGCAATGGCATA | 27 |
| KLF6 | AAACCAGTTATGTGAGCGTTAGTCA | 28 |
| ACPP | AACACAAAGAAGCGTATCAATCGA | 29 |
| EGR3 | CCCCATAGGTTTTCCTGTTTAAAA | 30 |
| IGFBP4 | GACCCAGGAAGCCCCTCAT | 31 |
| IGF1 | GTATGTAGGGTGGGTGTTGAGAGA | 32 |
| IRS4¹ | GGAATCACCCATCTCCTTCTCTTT | 33 |
| FOSL2 | GAGACAGCTGCTCATCTCTCCTT | 34 |
| HRAS | CGTCAGGAGAGCACACACTTG | 35 |
| CLU | CGTGGTGACCCGCAGATAG | 36 |
| FN1 | CACCAAATCACAAGTTAGAATCACTTC | 37 |
| HSD17B1 | GACTCTCGCATAAGCCTTCGA | 38 |
| HSDL1 | GCACGATCTTGGCTCACTTCA | 39 |
| HSD11B2 | GGGTCTGTTTGGGCTCATGA | 40 |
| STC1 | GAAAGTCTCCCACCCCATCA | 41 |
| CYP11A1 | AAGGGCCAGAAGGTGAAGGA | 42 |
| GMNN | CCAGAATTGGCATTATGTAGTTACGT | 43 |
| HSD3B2 | TTGGGTAACAGCAAATCATATTGTCT | 44 |
| CYP19A1 | GCTTGTGAATTTTTCTTTGTGTACATGTAT | 45 |
| IGFBP5 | GGCCGGAGAAACCCTCAA | 46 |
| KCNK3 | CTCCTGCCCTGGTGACCTAA | 47 |
| SMAD7 | TAGAAGAAATGAAAGAAGAGTTAGGTGTCA | 48 |

¹IRS4 is the rhesus homolog of the human gene IRS1.

TABLE 12
qRT-PCR Reporter Sequences

| Genes | Reporter Sequence | SEQ ID NO. |
|---|---|---|
| NEK6 | AGGGCTATCCTTTACAAAT | 49 |
| AQP11 | CACTGGGACTTAAACAA | 50 |
| CCDC126 | CTACCTTTATGTGAAGAAAT | 51 |
| KLF6 | TCTTCCTGGAAATGAGCA | 52 |
| ACPP | ACATGACTGACAAAGAC | 53 |
| EGR3 | CTTATGTGAACTGAGAGAAA | 54 |
| IGFBP4 | AAGACCCACGTGCTAGG | 55 |
| IGF1 | ATCCACTCTTCTAGGGATAT | 56 |
| IRS4¹ | TAAGAAGAGGAAATCAAAGTC | 57 |
| FOSL2 | ACCATTGGCACCACCGT | 58 |
| HRAS | CCCCGGCTGCATGA | 59 |
| CLU | CGCAAGGCGAAGAC | 60 |
| FN1 | ACCGCTCAGTATTTTA | 61 |
| HSD17B1 | CCAGCAAGTTCGCG | 62 |
| HSDL1 | AGCCCGGGATGCAG | 63 |
| HSD11B2 | CTGCGCCTCTCCACT | 64 |
| STC1 | CTGGTACTCTGGCAAAT | 65 |
| CYP11A1 | TGCCTGAAAAGCC | 66 |
| GMNN | ACCTCCACTAGTTCTTT | 67 |
| HSD3B2 | TGTCCTAATCATACGCCAGAG | 68 |
| CYP19A1 | TAGTAGTCTGTGCATAAGGT | 69 |
| IGFBP5 | CCCTATAATTCTGACCCGCT | 70 |
| KCNK3 | TTGAGTCTCACAACAGCCTA | 71 |
| SMAD7 | CCAAGGTACCATCTCTAGG | 72 |

¹IRS4 is the rhesus homolog of the human gene IRS1.

5. qRT-PCR Analysis

[0362] Mean gene expression values were compared between groups (IVM vs. VVM) adjusted for background using analysis of covariance on rank-transformed expression levels. Pearson correlation coefficients were calculated to evaluate the degree of collinearity and similarity among the expression levels of the various genes. Gene expression levels were analyzed for a relationship to oocyte quality. A single gene generalized estimating equation (GEE) was used to calculate the relationship of gene expression to oocyte quality. GEE is a special case of the generalized linear model taking into consideration the occurrence of multiple oocytes per animal in the same analysis.

[0363] Odds ratios with 95% confidence intervals and p-values were calculated for each gene as each was related to oocyte quality. Univariate generalized estimating equations analysis (GEE) showed that the expression levels of 24 genes (marked with an asterisk in FIG. 2) were significantly related to oocyte quality (IVM vs. VVM), as shown in Table 13:

TABLE 13
Calculation of Oocyte Quality Odd Ratios

| | | | | | | | | % increase |
|---|---|---|---|---|---|---|---|---|
| | | | | | | | | in oocyte |
| | Paramet | 95% Confidence | | | Odds | | | quality per |
| Gene | Estimate | Limits | | P-value | ratio | (95% C.I.) | | ΔCt unit |
| NEK6 | 0.1761 | 0.0549 | 0.2973 | 0.0044 | 1.1926 | 1.0564 | 1.3462 | 19.26 |
| AQP11 | 0.4877 | 0.1308 | 0.8446 | 0.0074 | 1.6286 | 1.1397 | 2.3270 | 62.86 |
| CCDC126 | −0.1489 | −0.2730 | −0.0248 | 0.0187 | 0.8617 | 0.7611 | 0.9755 | −13.83 |
| KLF6 | −0.2233 | −0.4347 | −0.0119 | 0.0385 | 0.7999 | 0.6475 | 0.9882 | −20.01 |
| ACPP | −1.8279 | −3.4751 | −0.1807 | 0.0296 | 0.1608 | 0.0310 | 0.8347 | −83.92 |
| EGR3 | −0.0934 | −0.1851 | −0.0018 | 0.0458 | 0.9108 | 0.8310 | 0.9982 | −8.92 |
| IGFBP4 | 0.729 | 0.0135 | 1.4445 | 0.0458 | 2.0730 | 1.0136 | 4.2397 | 107.30 |
| IGF1 | −0.5011 | −0.9215 | −0.0807 | 0.0195 | 0.6059 | 0.3979 | 0.9225 | −39.41 |
| IRS1¹ | −1.0668 | −1.5369 | −0.5967 | <.0001 | 0.3441 | 0.2150 | 0.5506 | −65.59 |
| FOSL2 | −0.0406 | −0.0682 | −0.013 | 0.0039 | 0.9602 | 0.9341 | 0.9871 | −3.98 |
| HRAS | 0.1602 | 0.0187 | 0.3017 | 0.0265 | 1.1737 | 1.0189 | 1.3522 | 17.37 |
| CLU | 0.5684 | 0.4395 | 0.6973 | <.0001 | 1.7654 | 1.5519 | 2.0083 | 76.54 |
| FN1 | 0.097 | 0.0790 | 0.115 | <.0001 | 1.1019 | 1.0822 | 1.1219 | 10.19 |
| HSD17B1 | 0.9201 | 0.5145 | 1.3257 | <.0001 | 2.5095 | 1.6728 | 3.7648 | 150.95 |
| HSDL1 | 0.1361 | 0.1140 | 0.1582 | <.0001 | 1.1458 | 1.1208 | 1.1714 | 14.58 |
| HSD11B2 | 0.0873 | 0.0694 | 0.1051 | <.0001 | 1.0912 | 1.0719 | 1.1108 | 9.12 |
| STC1 | 0.7103 | 0.1056 | 1.315 | 0.0213 | 2.0346 | 1.1114 | 3.7248 | 103.46 |
| CYP11A1 | 0.1552 | 0.1287 | 0.1817 | <.0001 | 1.1679 | 1.1373 | 1.1993 | 16.79 |
| GMNN | 0.1466 | 0.1022 | 0.191 | <.0001 | 1.1579 | 1.1076 | 1.2105 | 15.79 |
| HSD3B2 | 0.648 | 0.1304 | 1.1656 | 0.0141 | 1.9117 | 1.1393 | 3.2078 | 91.17 |
| CYP19A1 | 2.4178 | 1.3035 | 3.5321 | <.0001 | 11.2211 | 3.6822 | 34.1957 | 1022.11 |
| IGFBP5 | 0.0283 | 0.0033 | 0.0533 | 0.0265 | 1.0287 | 1.0033 | 1.0547 | 2.87 |
| KCNK3 | 0.0002 | 0.0000 | 0.0003 | 0.0152 | 1.0002 | 1.0000 | 1.0003 | 0.02 |
| SMAD7 | 0.0324 | 0.0090 | 0.0557 | 0.0066 | 1.0329 | 1.0090 | 1.0573 | 3.29 |

¹Based on the homologous rhesus monkey gene IRS4.

[0364] The odds ratios calculated for each of these 24 genes allow quality of oocytes to be compared. For each one unit change in CT value, the odds of a quality oocyte increases or decreases as indicated by the odds ratio. This allows oocytes to be compared to each other or to a reference sample set in order to judge quality and select the oocytes based on probability of having desired developmental potential.

[0365] The disclosures of each and every patent, patent application, and publication cited herein are hereby incorporated herein by reference in their entirety.

[0366] One skilled in the art will readily appreciate that the present invention is well adapted to carry out the objects and obtain the ends and advantages mentioned, as well as those inherent therein. While the invention has been disclosed with reference to specific embodiments, it is apparent that other embodiments and variations of this invention may be devised by others skilled in the art without departing from the true spirit and scope used in the practice of the invention. The appended claims are intended to be construed to include all such embodiments and equivalent variations.

The application's sequence listing, which the Patent Office published only in electronic form, follows.

SEQUENCE LISTING (280 sequences)

SEQ ID NO: 1 - DNA, 24 bp, Artificial Sequence
  Description of Artificial Sequence: Synthetic primer
ggaaggatgggatgtaaaaaagct

SEQ ID NO: 2 - DNA, 22 bp, Artificial Sequence
  Description of Artificial Sequence: Synthetic primer
ggaagccgccttatagttttca

SEQ ID NO: 3 - DNA, 28 bp, Artificial Sequence
  Description of Artificial Sequence: Synthetic primer
ccaaatctctgttctcttctgtgtactc

SEQ ID NO: 4 - DNA, 20 bp, Artificial Sequence
  Description of Artificial Sequence: Synthetic primer
tggctgggctggtattttgt

SEQ ID NO: 5 - DNA, 17 bp, Artificial Sequence
  Description of Artificial Sequence: Synthetic primer
aagccacccccgttcct

SEQ ID NO: 6 - DNA, 25 bp, Artificial Sequence
  Description of Artificial Sequence: Synthetic primer
aaagcaacaaaagaaaatgcactct

SEQ ID NO: 7 - DNA, 22 bp, Artificial Sequence
  Description of Artificial Sequence: Synthetic primer
tggactgaatgtgcctaatgga

SEQ ID NO: 8 - DNA, 15 bp, Artificial Sequence
  Description of Artificial Sequence: Synthetic primer
gcagcgccgcatcag

SEQ ID NO: 9 - DNA, 20 bp, Artificial Sequence
  Description of Artificial Sequence: Synthetic primer
ttggcaattgaatggaagca

SEQ ID NO: 10 - DNA, 18 bp, Artificial Sequence
  Description of Artificial Sequence: Synthetic primer
cccaagacctggcgtgat

SEQ ID NO: 11 - DNA, 21 bp, Artificial Sequence
  Description of Artificial Sequence: Synthetic primer
ggaagctgaaccctcctgatg

SEQ ID NO: 12 - DNA, 18 bp, Artificial Sequence
  Description of Artificial Sequence: Synthetic primer
ggtgtcccagctggcaaa

SEQ ID NO: 13 - DNA, 24 bp, Artificial Sequence
  Description of Artificial Sequence: Synthetic primer
gcctgttctgcttcaaagtattca

SEQ ID NO: 14 - DNA, 21 bp, Artificial Sequence
  Description of Artificial Sequence: Synthetic primer
gggctacccttcaatgacgtt

SEQ ID NO: 15 - DNA, 20 bp, Artificial Sequence
  Description of Artificial Sequence: Synthetic primer
ggaggctgaggcaggagaat

SEQ ID NO: 16 - DNA, 20 bp, Artificial Sequence
  Description of Artificial Sequence: Synthetic primer
aggccaaggtttcccagtgt

SEQ ID NO: 17 - DNA, 25 bp, Artificial Sequence
  Description of Artificial Sequence: Synthetic primer
agttctttactcgtcccctttcatc

SEQ ID NO: 18 - DNA, 21 bp, Artificial Sequence
  Description of Artificial Sequence: Synthetic primer
ggcaccacattcaacctcatc

SEQ ID NO: 19 - DNA, 24 bp, Artificial Sequence
  Description of Artificial Sequence: Synthetic primer
tgttgagaattttactgccgaagt

SEQ ID NO: 20 - DNA, 19 bp, Artificial Sequence
  Description of Artificial Sequence: Synthetic primer
tggcccaaccagaagcttt

SEQ ID NO: 21 - DNA, 27 bp, Artificial Sequence
  Description of Artificial Sequence: Synthetic primer
ctcttaaagaatgttttggtctccatt

SEQ ID NO: 22 - DNA, 24 bp, Artificial Sequence
  Description of Artificial Sequence: Synthetic primer
gggtgaacaattttgtggctattt

SEQ ID NO: 23 - DNA, 19 bp, Artificial Sequence
  Description of Artificial Sequence: Synthetic primer
tgtgctggccactgattcc

SEQ ID NO: 24 - DNA, 23 bp, Artificial Sequence
  Description of Artificial Sequence: Synthetic primer
caagaaggatttggtccgtcata

SEQ ID NO: 25 - DNA, 21 bp, Artificial Sequence
  Description of Artificial Sequence: Synthetic primer
cgctaggaagttgcagaacca

SEQ ID NO: 26 - DNA, 25 bp, Artificial Sequence
  Description of Artificial Sequence: Synthetic primer
ggatgcctcattttcacagtaattt

SEQ ID NO: 27 - DNA, 23 bp, Artificial Sequence
  Description of Artificial Sequence: Synthetic primer
aacttctacctggcaatggcata

SEQ ID NO: 28 - DNA, 25 bp, Artificial Sequence
  Description of Artificial Sequence: Synthetic primer
aaaccagttatgtgagcgttagtca

SEQ ID NO: 29 - DNA, 24 bp, Artificial Sequence
  Description of Artificial Sequence: Synthetic primer
aacacaaagaagcgtatcaatcga

SEQ ID NO: 30 - DNA, 24 bp, Artificial Sequence
  Description of Artificial Sequence: Synthetic primer
ccccataggttttcctgtttaaaa

SEQ ID NO: 31 - DNA, 19 bp, Artificial Sequence
  Description of Artificial Sequence: Synthetic primer
gacccaggaagcccctcat

SEQ ID NO: 32 - DNA, 24 bp, Artificial Sequence
  Description of Artificial Sequence: Synthetic primer
gtatgtagggtgggtgttgagaga

SEQ ID NO: 33 - DNA, 24 bp, Artificial Sequence
  Description of Artificial Sequence: Synthetic primer
ggaatcacccatctccttctcttt

SEQ ID NO: 34 - DNA, 23 bp, Artificial Sequence
  Description of Artificial Sequence: Synthetic primer
gagacagctgctcatctctcctt

SEQ ID NO: 35 - DNA, 21 bp, Artificial Sequence
  Description of Artificial Sequence: Synthetic primer
cgtcaggagagcacacacttg

SEQ ID NO: 36 - DNA, 19 bp, Artificial Sequence
  Description of Artificial Sequence: Synthetic primer
cgtggtgacccgcagatag

SEQ ID NO: 37 - DNA, 27 bp, Artificial Sequence
  Description of Artificial Sequence: Synthetic primer
caccaaatcacaagttagaatcacttc

SEQ ID NO: 38 - DNA, 21 bp, Artificial Sequence
  Description of Artificial Sequence: Synthetic primer
gactctcgcataagccttcga

SEQ ID NO: 39 - DNA, 21 bp, Artificial Sequence
  Description of Artificial Sequence: Synthetic primer
gcacgatcttggctcacttca

SEQ ID NO: 40 - DNA, 20 bp, Artificial Sequence
  Description of Artificial Sequence: Synthetic primer
gggtctgtttgggctcatga

SEQ ID NO: 41 - DNA, 20 bp, Artificial Sequence
  Description of Artificial Sequence: Synthetic primer
gaaagtctcccaccccatca

SEQ ID NO: 42 - DNA, 20 bp, Artificial Sequence
  Description of Artificial Sequence: Synthetic primer
aagggccagaaggtgaagga

SEQ ID NO: 43 - DNA, 26 bp, Artificial Sequence
  Description of Artificial Sequence: Synthetic primer
ccagaattggcattatgtagttacgt

SEQ ID NO: 44 - DNA, 26 bp, Artificial Sequence
  Description of Artificial Sequence: Synthetic primer
ttgggtaacagcaaatcatattgtct

SEQ ID NO: 45 - DNA, 30 bp, Artificial Sequence
  Description of Artificial Sequence: Synthetic primer
gcttgtgaatttttctttgtgtacatgtat

SEQ ID NO: 46 - DNA, 18 bp, Artificial Sequence
  Description of Artificial Sequence: Synthetic primer
ggccggagaaaccctcaa

SEQ ID NO: 47 - DNA, 20 bp, Artificial Sequence
  Description of Artificial Sequence: Synthetic primer
ctcctgccctggtgacctaa

SEQ ID NO: 48 - DNA, 30 bp, Artificial Sequence
  Description of Artificial Sequence: Synthetic primer
tagaagaaatgaaagaagagttaggtgtca

SEQ ID NO: 49 - DNA, 19 bp, Artificial Sequence
  Description of Artificial Sequence: Synthetic primer
agggctatcctttacaaat

SEQ ID NO: 50 - DNA, 17 bp, Artificial Sequence
  Description of Artificial Sequence: Synthetic primer
cactgggacttaaacaa

SEQ ID NO: 51 - DNA, 20 bp, Artificial Sequence
  Description of Artificial Sequence: Synthetic primer
ctacctttatgtgaagaaat

SEQ ID NO: 52 - DNA, 18 bp, Artificial Sequence
  Description of Artificial Sequence: Synthetic primer
tcttcctggaaatgagca

SEQ ID NO: 53 - DNA, 17 bp, Artificial Sequence
  Description of Artificial Sequence: Synthetic primer
acatgactgacaaagac

SEQ ID NO: 54 - DNA, 20 bp, Artificial Sequence
  Description of Artificial Sequence: Synthetic primer
cttatgtgaactgagagaaa

SEQ ID NO: 55 - DNA, 17 bp, Artificial Sequence
  Description of Artificial Sequence: Synthetic primer
aagacccacgtgctagg

SEQ ID NO: 56 - DNA, 20 bp, Artificial Sequence
  Description of Artificial Sequence: Synthetic primer
atccactcttctagggatat

SEQ ID NO: 57 - DNA, 21 bp, Artificial Sequence
  Description of Artificial Sequence: Synthetic primer
taagaagaggaaatcaaagtc

SEQ ID NO: 58 - DNA, 17 bp, Artificial Sequence
  Description of Artificial Sequence: Synthetic primer
accattggcaccaccgt

SEQ ID NO: 59 - DNA, 14 bp, Artificial Sequence
  Description of Artificial Sequence: Synthetic primer
ccccggctgcatga

SEQ ID NO: 60 - DNA, 14 bp, Artificial Sequence
  Description of Artificial Sequence: Synthetic primer
cgcaaggcgaagac

SEQ ID NO: 61 - DNA, 16 bp, Artificial Sequence
  Description of Artificial Sequence: Synthetic primer
accgctcagtatttta

SEQ ID NO: 62 - DNA, 14 bp, Artificial Sequence
  Description of Artificial Sequence: Synthetic primer
ccagcaagttcgcg

SEQ ID NO: 63 - DNA, 14 bp, Artificial Sequence
  Description of Artificial Sequence: Synthetic primer
agcccgggatgcag

SEQ ID NO: 64 - DNA, 15 bp, Artificial Sequence
  Description of Artificial Sequence: Synthetic primer
ctgcgcctctccact

SEQ ID NO: 65 - DNA, 17 bp, Artificial Sequence
  Description of Artificial Sequence: Synthetic primer
ctggtactctggcaaat

SEQ ID NO: 66 - DNA, 13 bp, Artificial Sequence
  Description of Artificial Sequence: Synthetic primer
tgcctgaaaagcc

SEQ ID NO: 67 - DNA, 17 bp, Artificial Sequence
  Description of Artificial Sequence: Synthetic primer
acctccactagttcttt

SEQ ID NO: 68 - DNA, 21 bp, Artificial Sequence
  Description of Artificial Sequence: Synthetic primer
tgtcctaatcatacgccagag

SEQ ID NO: 69 - DNA, 20 bp, Artificial Sequence
  Description of Artificial Sequence: Synthetic primer
tagtagtctgtgcataaggt

SEQ ID NO: 70 - DNA, 20 bp, Artificial Sequence
  Description of Artificial Sequence: Synthetic primer
ccctataattctgacccgct

SEQ ID NO: 71 - DNA, 20 bp, Artificial Sequence
  Description of Artificial Sequence: Synthetic primer
ttgagtctcacaacagccta

SEQ ID NO: 72 - DNA, 19 bp, Artificial Sequence
  Description of Artificial Sequence: Synthetic primer
ccaaggtaccatctctagg

SEQ ID NO: 73 - DNA, 2810 bp, Homo sapiens
gggcgggcgcgcgggcgcgcgggcccgcgcaggcggtggcggcggcggcggaaccgagctgacgggcgtgcggccgctgcgccgcaaactcgtgtgggacgcaccgctccagccgcccgcgggccagcgcaccggtcccccagcggcagccgagcccgcccgcgcgccggagaagaagacacatgaattagagacagcacgggggagcaggctgtggagctgggagtgacggggtgagtccaggaaggctgcctggaggagatgcccaggagagaagtttgctgggaggcagctcatttccggcaggaggagcagagcctgccaaggcctcgagttcgtgccctcgtgaggctggcatgcaggatggcaggacagcccggccacatgccccatggagggagttccaacaacctctgccacaccctggggcctgtgcatcctcctgacccacagaggcatcccaacacgctgtcttttcgctgctcgctggcggacttccagatcgaaaagaagataggccgaggacagttcagcgaggtgtacaaggccacctgcctgctggacaggaagacagtggctctgaagaaggtgcagatctttgagatgatggacgccaaggcgaggcaggactgtgtcaaggagatcggcctcttgaagcaactgaaccacccaaatatcatcaagtatttggactcgtttatcgaagacaacgagctgaacattgtgctggagttggctgacgcaggggacctctcgcagatgatcaagtactttaagaagcagaagcggctcatcccggagaggacagtatggaagtactttgtgcagctgtgcagcgccgtggagcacatgcattcacgccgggtgatgcaccgagacatcaagcctgccaacgtgttcatcacagccacgggcgtcgtgaagctcggtgaccttggtctgggccgcttcttcagctctgagaccaccgcagcccactccctagtggggacgccctactacatgtcaccggagaggatccatgagaacggctacaacttcaagtccgacatctggtccctgggctgtctgctgtacgagatggcagccctccagagccccttctatggagataagatgaatctcttctccctgtgccagaagatcgagcagtgtgactaccccccactccccggggagcactactccgagaagttacgagaactggtcagcatgtgcatctgccctgacccccaccagagacctgacatcggatacgtgcaccaggtggccaagcagatgcacatctggatgtccagcacctgagcgtggatgcaccgtgccttatcaaagccagcaccactttgccttacttgagtcgtcttctcttcgagtggccacctggtagcctagaacagctaagaccacagggttcagcaggttccccaaaaggctgcccagccttacagcagatgctgaaggcagagcagctgagggaggggcgctggccacatgtcactgatggtcagattccaaagtcctttctttatactgttgtggacaatctcagctgggtcaataagggcaggtggttcagcgagccacggcagccccctgtatctggattgtaatgtgaatctttagggtaattcctccagtgacctgtcaaggcttatgctaacaggagacttgcaggagaccgtgtgatttgtgtagtgagcctttgaaaatggttagtaccgggttcagtttagttcttagtatcttttcaatcaagctgtgtgcttaatttactctgttgtaaagggataaagtggaaatcatttttttccgtggagtggtgattctgctaacatttttatctacgttttataacttggtgagtgacgatgagagccctgcacctggccagagtgtcacaggcaaaaggcatcgggaagcaggagcatcttcttggcagccaggctgggccatcttctcctggacacctgctgtgtaccaggaacttcgtcacctccttgaatgctggcggttcatttcatgatcagtgttaagcattttcctccatgggaaggaagcatgggatatagaaaagcgaagggctgtcctttacaaattctggttctgcaacttcctagcgtgactttgggcttgggcaagtttcttagccgttctgagccttcatttcctcatctgtacaatgagattaatagtacctatcatctaccttcaggattgctgacagacagaatttgaaataaaatatgcaagttagctaatacaaaaagtagatgatccaaaaatggtagccactcacccttcacaaactgaagtccatggaccacggaagtcgagaattaatgtacacctgtatcatgtgtaggaaaccagaaatgtgttccttatttcttgttcccaaacaggattaactgtgaagactaatttataaatgtgaacctaagaaaactccacctctgaaggaaatcatttgaattttgtttttgtacgtaaagttaaccttccaattgtctgagctgtcgtcactgacttcatgacagtctggccctccagacaagagcagcgctggcatcgggcaggtgattcctgacacctgctgcctgcaggcattcactgaccaggcctttcctggaggaaacacccagggccgggcggctgctgtttccacacgtggactcggatctgctgtgacaccgtcagcccgacagtctctccatatgcagcctttcctctgtacttttctccatggttgaaataaaacagggtgactgggagttacttagaattcatgaagattttaaaaaaaaaaaaaa

SEQ ID NO: 74 - protein, 347 aa, Homo sapiens
MPRREVCWEAAHFRQEEQSLPRPRVRALVRLACRMAGQPGHMPHGGSSNNLCHTLGPVHPPDPQRHPNTLSFRCSLADFQIEKKIGRGQFSEVYKATCLLDRKTVALKKVQIFEMMDAKARQDCVKEIGLLKQLNHPNIIKYLDSFIEDNELNIVLELADAGDLSQMIKYFKKQKRLIPERTVWKYFVQLCSAVEHMHSRRVMHRDIKPANVFITATGVVKLGDLGLGRFFSSETTAAHSLVGTPYYMSPERIHENGYNFKSDIWSLGCLLYEMAALQSPFYGDKMNLFSLCQKIEQCDYPPLPGEHYSEKLRELVSMCICPDPHQRPDIGYVHQVAKQMHIWMSST

SEQ ID NO: 75 - DNA, 2592 bp, Homo sapiens
gcaatgctaggcgatggggaatccgaagacgcacaggagtccaagggttggctgactgcagaccctcatcataagtctagagccggagaagatggggagacgccggcctgcgccctttcgtgccctcgtgaggctggcatgcaggatggcaggacagcccggccacatgccccatggagggagttccaacaacctctgccacaccctggggcctgtgcatcctcctgacccacagaggcatcccaacacgctgtcttttcgctgctcgctggcggacttccagatcgaaaagaagataggccgaggacagttcagcgaggtgtacaaggccacctgcctgctggacaggaagacagtggctctgaagaaggtgcagatctttgagatgatggacgccaaggcgaggcaggactgtgtcaaggagatcggcctcttgaagcaactgaaccacccaaatatcatcaagtatttggactcgtttatcgaagacaacgagctgaacattgtgctggagttggctgacgcaggggacctctcgcagatgatcaagtactttaagaagcagaagcggctcatcccggagaggacagtatggaagtactttgtgcagctgtgcagcgccgtggagcacatgcattcacgccgggtgatgcaccgagacatcaagcctgccaacgtgttcatcacagccacgggcgtcgtgaagctcggtgaccttggtctgggccgcttcttcagctctgagaccaccgcagcccactccctagtggggacgccctactacatgtcaccggagaggatccatgagaacggctacaacttcaagtccgacatctggtccctgggctgtctgctgtacgagatggcagccctccagagccccttctatggagataagatgaatctcttctccctgtgccagaagatcgagcagtgtgactaccccccactccccggggagcactactccgagaagttacgagaactggtcagcatgtgcatctgccctgacccccaccagagacctgacatcggatacgtgcaccaggtggccaagcagatgcacatctggatgtccagcacctgagcgtggatgcaccgtgccttatcaaagccagcaccactttgccttacttgagtcgtcttctcttcgagtggccacctggtagcctagaacagctaagaccacagggttcagcaggttccccaaaaggctgcccagccttacagcagatgctgaaggcagagcagctgagggaggggcgctggccacatgtcactgatggtcagattccaaagtcctttctttatactgttgtggacaatctcagctgggtcaataagggcaggtggttcagcgagccacggcagccccctgtatctggattgtaatgtgaatctttagggtaattcctccagtgacctgtcaaggcttatgctaacaggagacttgcaggagaccgtgtgatttgtgtagtgagcctttgaaaatggttagtaccgggttcagtttagttcttagtatcttttcaatcaagctgtgtgcttaatttactctgttgtaaagggataaagtggaaatcatttttttccgtggagtggtgattctgctaacatttttatctacgttttataacttggtgagtgacgatgagagccctgcacctggccagagtgtcacaggcaaaaggcatcgggaagcaggagcatcttcttggcagccaggctgggccatcttctcctggacacctgctgtgtaccaggaacttcgtcacctccttgaatgctggcggttcatttcatgatcagtgttaagcattttcctccatgggaaggaagcatgggatatagaaaagcgaagggctgtcctttacaaattctggttctgcaacttcctagcgtgactttgggcttgggcaagtttcttagccgttctgagccttcatttcctcatctgtacaatgagattaatagtacctatcatctaccttcaggattgctgacagacagaatttgaaataaaatatgcaagttagctaatacaaaaagtagatgatccaaaaatggtagccactcacccttcacaaactgaagtccatggaccacggaagtcgagaattaatgtacacctgtatcatgtgtaggaaaccagaaatgtgttccttatttcttgttcccaaacaggattaactgtgaagactaatttataaatgtgaacctaagaaaactccacctctgaaggaaatcatttgaattttgtttttgtacgtaaagttaaccttccaattgtctgagctgtcgtcactgacttcatgacagtctggccctccagacaagagcagcgctggcatcgggcaggtgattcctgacacctgctgcctgcaggcattcactgaccaggcctttcctggaggaaacacccagggccgggcggctgctgtttccacacgtggactcggatctgctgtgacaccgtcagcccgacagtctctccatatgcagcctttcctctgtacttttctccatggttgaaataaaacagggtgactgggagttacttagaattcatgaagattttaaaaaaaaaaaaaa

SEQ ID NO: 76 - protein, 331 aa, Homo sapiens
MGRRRPAPFRALVRLACRMAGQPGHMPHGGSSNNLCHTLGPVHPPDPQRHPNTLSFRCSLADFQIEKKIGRGQFSEVYKATCLLDRKTVALKKVQIFEMMDAKARQDCVKEIGLLKQLNHPNIIKYLDSFIEDNELNIVLELADAGDLSQMIKYFKKQKRLIPERTVWKYFVQLCSAVEHMHSRRVMHRDIKPANVFITATGVVKLGDLGLGRFFSSETTAAHSLVGTPYYMSPERIHENGYNFKSDIWSLGCLLYEMAALQSPFYGDKMNLFSLCQKIEQCDYPPLPGEHYSEKLRELVSMCICPDPHQRPDIGYVHQVAKQMHIWMSST

SEQ ID NO: 77 - DNA, 2587 bp, Homo sapiens
gagcgtgtcggcggccgggcgggcgggggcggcgtgtccgcgtgtcccggggtgtgcgcgtccccggcgggtgtgcgtgtgcaccccggagcgtctggtggcgttgttgggttcgtgccctcgtgaggctggcatgcaggatggcaggacagcccggccacatgccccatggagggagttccaacaacctctgccacaccctggggcctgtgcatcctcctgacccacagaggcatcccaacacgctgtcttttcgctgctcgctggcggacttccagatcgaaaagaagataggccgaggacagttcagcgaggtgtacaaggccacctgcctgctggacaggaagacagtggctctgaagaaggtgcagatctttgagatgatggacgccaaggcgaggcaggactgtgtcaaggagatcggcctcttgaagcaactgaaccacccaaatatcatcaagtatttggactcgtttatcgaagacaacgagctgaacattgtgctggagttggctgacgcaggggacctctcgcagatgatcaagtactttaagaagcagaagcggctcatcccggagaggacagtatggaagtactttgtgcagctgtgcagcgccgtggagcacatgcattcacgccgggtgatgcaccgagacatcaagcctgccaacgtgttcatcacagccacgggcgtcgtgaagctcggtgaccttggtctgggccgcttcttcagctctgagaccaccgcagcccactccctagtggggacgccctactacatgtcaccggagaggatccatgagaacggctacaacttcaagtccgacatctggtccctgggctgtctgctgtacgagatggcagccctccagagccccttctatggagataagatgaatctcttctccctgtgccagaagatcgagcagtgtgactaccccccactccccggggagcactactccgagaagttacgagaactggtcagcatgtgcatctgccctgacccccaccagagacctgacatcggatacgtgcaccaggtggccaagcagatgcacatctggatgtccagcacctgagcgtggatgcaccgtgccttatcaaagccagcaccactttgccttacttgagtcgtcttctcttcgagtggccacctggtagcctagaacagctaagaccacagggttcagcaggttccccaaaaggctgcccagccttacagcagatgctgaaggcagagcagctgagggaggggcgctggccacatgtcactgatggtcagattccaaagtcctttctttatactgttgtggacaatctcagctgggtcaataagggcaggtggttcagcgagccacggcagccccctgtatctggattgtaatgtgaatctttagggtaattcctccagtgacctgtcaaggcttatgctaacaggagacttgcaggagaccgtgtgatttgtgtagtgagcctttgaaaatggttagtaccgggttcagtttagttcttagtatcttttcaatcaagctgtgtgcttaatttactctgttgtaaagggataaagtggaaatcatttttttccgtggagtggtgattctgctaacatttttatctacgttttataacttggtgagtgacgatgagagccctgcacctggccagagtgtcacaggcaaaaggcatcgggaagcaggagcatcttcttggcagccaggctgggccatcttctcctggacacctgctgtgtaccaggaacttcgtcacctccttgaatgctggcggttcatttcatgatcagtgttaagcattttcctccatgggaaggaagcatgggatatagaaaagcgaagggctgtcctttacaaattctggttctgcaacttcctagcgtgactttgggcttgggcaagtttcttagccgttctgagccttcatttcctcatctgtacaatgagattaatagtacctatcatctaccttcaggattgctgacagacagaatttgaaataaaatatgcaagttagctaatacaaaaagtagatgatccaaaaatggtagccactcacccttcacaaactgaagtccatggaccacggaagtcgagaattaatgtacacctgtatcatgtgtaggaaaccagaaatgtgttccttatttcttgttcccaaacaggattaactgtgaagactaatttataaatgtgaacctaagaaaactccacctctgaaggaaatcatttgaattttgtttttgtacgtaaagttaaccttccaattgtctgagctgtcgtcactgacttcatgacagtctggccctccagacaagagcagcgctggcatcgggcaggtgattcctgacacctgctgcctgcaggcattcactgaccaggcctttcctggaggaaacacccagggccgggcggctgctgtttccacacgtggactcggatctgctgtgacaccgtcagcccgacagtctctccatatgcagcctttcctctgtacttttctccatggttgaaataaaacagggtgactgggagttacttagaattcatgaagattttaaaaaaaaaaaaaa

SEQ ID NO: 78 - protein, 313 aa, Homo sapiens
MAGQPGHMPHGGSSNNLCHTLGPVHPPDPQRHPNTLSFRCSLADFQIEKKIGRGQFSEVYKATCLLDRKTVALKKVQIFEMMDAKARQDCVKEIGLLKQLNHPNIIKYLDSFIEDNELNIVLELADAGDLSQMIKYFKKQKRLIPERTVWKYFVQLCSAVEHMHSRRVMHRDIKPANVFITATGVVKLGDLGLGRFFSSETTAAHSLVGTPYYMSPERIHENGYNFKSDIWSLGCLLYEMAALQSPFYGDKMNLFSLCQKIEQCDYPPLPGEHYSEKLRELVSMCICPDPHQRPDIGYVHQVAKQMHIWMSST

SEQ ID NO: 79 - DNA, 2596 bp, Homo sapiens
ttttgtctgccccttcctgcctgtgggaaggagagaaaattaggggaggccacgggcttgaaagctttccctgcatggaggccactggatgggattctagatgctcgcctgggacccaggttcgtgccctcgtgaggctggcatgcaggatggcaggacagcccggccacatgccccatggagggagttccaacaacctctgccacaccctggggcctgtgcatcctcctgacccacagaggcatcccaacacgctgtcttttcgctgctcgctggcggacttccagatcgaaaagaagataggccgaggacagttcagcgaggtgtacaaggccacctgcctgctggacaggaagacagtggctctgaagaaggtgcagatctttgagatgatggacgccaaggcgaggcaggactgtgtcaaggagatcggcctcttgaagcaactgaaccacccaaatatcatcaagtatttggactcgtttatcgaagacaacgagctgaacattgtgctggagttggctgacgcaggggacctctcgcagatgatcaagtactttaagaagcagaagcggctcatcccggagaggacagtatggaagtactttgtgcagctgtgcagcgccgtggagcacatgcattcacgccgggtgatgcaccgagacatcaagcctgccaacgtgttcatcacagccacgggcgtcgtgaagctcggtgaccttggtctgggccgcttcttcagctctgagaccaccgcagcccactccctagtggggacgccctactacatgtcaccggagaggatccatgagaacggctacaacttcaagtccgacatctggtccctgggctgtctgctgtacgagatggcagccctccagagccccttctatggagataagatgaatctcttctccctgtgccagaagatcgagcagtgtgactaccccccactccccggggagcactactccgagaagttacgagaactggtcagcatgtgcatctgccctgacccccaccagagacctgacatcggatacgtgcaccaggtggccaagcagatgcacatctggatgtccagcacctgagcgtggatgcaccgtgccttatcaaagccagcaccactttgccttacttgagtcgtcttctcttcgagtggccacctggtagcctagaacagctaagaccacagggttcagcaggttccccaaaaggctgcccagccttacagcagatgctgaaggcagagcagctgagggaggggcgctggccacatgtcactgatggtcagattccaaagtcctttctttatactgttgtggacaatctcagctgggtcaataagggcaggtggttcagcgagccacggcagccccctgtatctggattgtaatgtgaatctttagggtaattcctccagtgacctgtcaaggcttatgctaacaggagacttgcaggagaccgtgtgatttgtgtagtgagcctttgaaaatggttagtaccgggttcagtttagttcttagtatcttttcaatcaagctgtgtgcttaatttactctgttgtaaagggataaagtggaaatcatttttttccgtggagtggtgattctgctaacatttttatctacgttttataacttggtgagtgacgatgagagccctgcacctggccagagtgtcacaggcaaaaggcatcgggaagcaggagcatcttcttggcagccaggctgggccatcttctcctggacacctgctgtgtaccaggaacttcgtcacctccttgaatgctggcggttcatttcatgatcagtgttaagcattttcctccatgggaaggaagcatgggatatagaaaagcgaagggctgtcctttacaaattctggttctgcaacttcctagcgtgactttgggcttgggcaagtttcttagccgttctgagccttcatttcctcatctgtacaatgagattaatagtacctatcatctaccttcaggattgctgacagacagaatttgaaataaaatatgcaagttagctaatacaaaaagtagatgatccaaaaatggtagccactcacccttcacaaactgaagtccatggaccacggaagtcgagaattaatgtacacctgtatcatgtgtaggaaaccagaaatgtgttccttatttcttgttcccaaacaggattaactgtgaagactaatttataaatgtgaacctaagaaaactccacctctgaaggaaatcatttgaattttgtttttgtacgtaaagttaaccttccaattgtctgagctgtcgtcactgacttcatgacagtctggccctccagacaagagcagcgctggcatcgggcaggtgattcctgacacctgctgcctgcaggcattcactgaccaggcctttcctggaggaaacacccagggccgggcggctgctgtttccacacgtggactcggatctgctgtgacaccgtcagcccgacagtctctccatatgcagcctttcctctgtacttttctccatggttgaaataaaacagggtgactgggagttacttagaattcatgaagattttaaaaaaaaaaaaaa

SEQ ID NO: 80 - protein, 338 aa, Homo sapiens
MEATGWDSRCSPGTQVRALVRLACRMAGQPGHMPHGGSSNNLCHTLGPVHPPDPQRHPNTLSFRCSLADFQIEKKIGRGQFSEVYKATCLLDRKTVALKKVQIFEMMDAKARQDCVKEIGLLKQLNHPNIIKYLDSFIEDNELNIVLELADAGDLSQMIKYFKKQKRLIPERTVWKYFVQLCSAVEHMHSRRVMHRDIKPANVFITATGVVKLGDLGLGRFFSSETTAAHSLVGTPYYMSPERIHENGYNFKSDIWSLGCLLYEMAALQSPFYGDKMNLFSLCQKIEQCDYPPLPGEHYSEKLRELVSMCICPDPHQRPDIGYVHQVAKQMHIWMSST

SEQ ID NO: 81 - DNA, 2594 bp, Homo sapiens
cacccaccccagcccagagaggcgacccagctccctggaggcccaggcacctcatgtctgccctcaacccagagtggagcagaccttccctggagcttctcaggagccacttcaaaagttcgtgccctcgtgaggctggcatgcaggatggcaggacagcccggccacatgccccatggagggagttccaacaacctctgccacaccctggggcctgtgcatcctcctgacccacagaggcatcccaacacgctgtcttttcgctgctcgctggcggacttccagatcgaaaagaagataggccgaggacagttcagcgaggtgtacaaggccacctgcctgctggacaggaagacagtggctctgaagaaggtgcagatctttgagatgatggacgccaaggcgaggcaggactgtgtcaaggagatcggcctcttgaagcaactgaaccacccaaatatcatcaagtatttggactcgtttatcgaagacaacgagctgaacattgtgctggagttggctgacgcaggggacctctcgcagatgatcaagtactttaagaagcagaagcggctcatcccggagaggacagtatggaagtactttgtgcagctgtgcagcgccgtggagcacatgcattcacgccgggtgatgcaccgagacatcaagcctgccaacgtgttcatcacagccacgggcgtcgtgaagctcggtgaccttggtctgggccgcttcttcagctctgagaccaccgcagcccactccctagtggggacgccctactacatgtcaccggagaggatccatgagaacggctacaacttcaagtccgacatctggtccctgggctgtctgctgtacgagatggcagccctccagagccccttctatggagataagatgaatctcttctccctgtgccagaagatcgagcagtgtgactaccccccactccccggggagcactactccgagaagttacgagaactggtcagcatgtgcatctgccctgacccccaccagagacctgacatcggatacgtgcaccaggtggccaagcagatgcacatctggatgtccagcacctgagcgtggatgcaccgtgccttatcaaagccagcaccactttgccttacttgagtcgtcttctcttcgagtggccacctggtagcctagaacagctaagaccacagggttcagcaggttccccaaaaggctgcccagccttacagcagatgctgaaggcagagcagctgagggaggggcgctggccacatgtcactgatggtcagattccaaagtcctttctttatactgttgtggacaatctcagctgggtcaataagggcaggtggttcagcgagccacggcagccccctgtatctggattgtaatgtgaatctttagggtaattcctccagtgacctgtcaaggcttatgctaacaggagacttgcaggagaccgtgtgatttgtgtagtgagcctttgaaaatggttagtaccgggttcagtttagttcttagtatcttttcaatcaagctgtgtgcttaatttactctgttgtaaagggataaagtggaaatcatttttttccgtggagtggtgattctgctaacatttttatctacgttttataacttggtgagtgacgatgagagccctgcacctggccagagtgtcacaggcaaaaggcatcgggaagcaggagcatcttcttggcagccaggctgggccatcttctcctggacacctgctgtgtaccaggaacttcgtcacctccttgaatgctggcggttcatttcatgatcagtgttaagcattttcctccatgggaaggaagcatgggatatagaaaagcgaagggctgtcctttacaaattctggttctgcaacttcctagcgtgactttgggcttgggcaagtttcttagccgttctgagccttcatttcctcatctgtacaatgagattaatagtacctatcatctaccttcaggattgctgacagacagaatttgaaataaaatatgcaagttagctaatacaaaaagtagatgatccaaaaatggtagccactcacccttcacaaactgaagtccatggaccacggaagtcgagaattaatgtacacctgtatcatgtgtaggaaaccagaaatgtgttccttatttcttgttcccaaacaggattaactgtgaagactaatttataaatgtgaacctaagaaaactccacctctgaaggaaatcatttgaattttgtttttgtacgtaaagttaaccttccaattgtctgagctgtcgtcactgacttcatgacagtctggccctccagacaagagcagcgctggcatcgggcaggtgattcctgacacctgctgcctgcaggcattcactgaccaggcctttcctggaggaaacacccagggccgggcggctgctgtttccacacgtggactcggatctgctgtgacaccgtcagcccgacagtctctccatatgcagcctttcctctgtacttttctccatggttgaaataaaacagggtgactgggagttacttagaattcatgaagattttaaaaaaaaaaaaaa

SEQ ID NO: 82 - protein, 313 aa, Homo sapiens; identical to SEQ ID NO: 78

SEQ ID NO: 83 - DNA, 2759 bp, Homo sapiens
cacccaccccagcccagagaggcgacccagctccctggaggcccaggcacctcatgtctgccctcaacccagagtggagcagaccttccctggagcttctcaggagccacttcaaaaggagaagaagacacatgaattagagacagcacgggggagcaggctgtggagctgggagtgacggggtgagtccaggaaggctgcctggaggagatgcccaggagagaagtttgctgggaggcagctcatttccggcaggaggagcagagcctgccaaggcctcgagttcgtgccctcgtgaggctggcatgcaggatggcaggacagcccggccacatgccccatggagggagttccaacaacctctgccacaccctggggcctgtgcatcctcctgacccacagaggcatcccaacacgctgtcttttcgctgctcgctggcggacttccagatcgaaaagaagataggccgaggacagttcagcgaggtgtacaaggccacctgcctgctggacaggaagacagtggctctgaagaaggtgcagatctttgagatgatggacgccaaggcgaggcaggactgtgtcaaggagatcggcctcttgaagcaactgaaccacccaaatatcatcaagtatttggactcgtttatcgaagacaacgagctgaacattgtgctggagttggctgacgcaggggacctctcgcagatgatcaagtactttaagaagcagaagcggctcatcccggagaggacagtatggaagtactttgtgcagctgtgcagcgccgtggagcacatgcattcacgccgggtgatgcaccgagacatcaagcctgccaacgtgttcatcacagccacgggcgtcgtgaagctcggtgaccttggtctgggccgcttcttcagctctgagaccaccgcagcccactccctagtggggacgccctactacatgtcaccggagaggatccatgagaacggctacaacttcaagtccgacatctggtccctgggctgtctgctgtacgagatggcagccctccagagccccttctatggagataagatgaatctcttctccctgtgccagaagatcgagcagtgtgactaccccccactccccggggagcactactccgagaagttacgagaactggtcagcatgtgcatctgccctgacccccaccagagacctgacatcggatacgtgcaccaggtggccaagcagatgcacatctggatgtccagcacctgagcgtggatgcaccgtgccttatcaaagccagcaccactttgccttacttgagtcgtcttctcttcgagtggccacctggtagcctagaacagctaagaccacagggttcagcaggttccccaaaaggctgcccagccttacagcagatgctgaaggcagagcagctgagggaggggcgctggccacatgtcactgatggtcagattccaaagtcctttctttatactgttgtggacaatctcagctgggtcaataagggcaggtggttcagcgagccacggcagccccctgtatctggattgtaatgtgaatctttagggtaattcctccagtgacctgtcaaggcttatgctaacaggagacttgcaggagaccgtgtgatttgtgtagtgagcctttgaaaatggttagtaccgggttcagtttagttcttagtatcttttcaatcaagctgtgtgcttaatttactctgttgtaaagggataaagtggaaatcatttttttccgtggagtggtgattctgctaacatttttatctacgttttataacttggtgagtgacgatgagagccctgcacctggccagagtgtcacaggcaaaaggcatcgggaagcaggagcatcttcttggcagccaggctgggccatcttctcctggacacctgctgtgtaccaggaacttcgtcacctccttgaatgctggcggttcatttcatgatcagtgttaagcattttcctccatgggaaggaagcatgggatatagaaaagcgaagggctgtcctttacaaattctggttctgcaacttcctagcgtgactttgggcttgggcaagtttcttagccgttctgagccttcatttcctcatctgtacaatgagattaatagtacctatcatctaccttcaggattgctgacagacagaatttgaaataaaatatgcaagttagctaatacaaaaagtagatgatccaaaaatggtagccactcacccttcacaaactgaagtccatggaccacggaagtcgagaattaatgtacacctgtatcatgtgtaggaaaccagaaatgtgttccttatttcttgttcccaaacaggattaactgtgaagactaatttataaatgtgaacctaagaaaactccacctctgaaggaaatcatttgaattttgtttttgtacgtaaagttaaccttccaattgtctgagctgtcgtcactgacttcatgacagtctggccctccagacaagagcagcgctggcatcgggcaggtgattcctgacacctgctgcctgcaggcattcactgaccaggcctttcctggaggaaacacccagggccgggcggctgctgtttccacacgtggactcggatctgctgtgacaccgtcagcccgacagtctctccatatgcagcctttcctctgtacttttctccatggttgaaataaaacagggtgactgggagttacttagaattcatgaagattttaaaaaaaaaaaaaa

SEQ ID NO: 84 - protein, 347 aa, Homo sapiens; identical to SEQ ID NO: 74

SEQ ID NO: 85 - DNA, 2645 bp, Homo sapiens
gggcgggcgcgcgggcgcgcgggcccgcgcaggcggtggcggcggcggcggaaccgagctgacgggcgtgcggccgctgcgccgcaaactcgtgtgggacgcaccgctccagccgcccgcgggccagcgcaccggtcccccagcggcagccgagcccgcccgcgcgccgttcgtgccctcgtgaggctggcatgcaggatggcaggacagcccggccacatgccccatggagggagttccaacaacctctgccacaccctggggcctgtgcatcctcctgacccacagaggcatcccaacacgctgtcttttcgctgctcgctggcggacttccagatcgaaaagaagataggccgaggacagttcagcgaggtgtacaaggccacctgcctgctggacaggaagacagtggctctgaagaaggtgcagatctttgagatgatggacgccaaggcgaggcaggactgtgtcaaggagatcggcctcttgaagcaactgaaccacccaaatatcatcaagtatttggactcgtttatcgaagacaacgagctgaacattgtgctggagttggctgacgcaggggacctctcgcagatgatcaagtactttaagaagcagaagcggctcatcccggagaggacagtatggaagtactttgtgcagctgtgcagcgccgtggagcacatgcattcacgccgggtgatgcaccgagacatcaagcctgccaacgtgttcatcacagccacgggcgtcgtgaagctcggtgaccttggtctgggccgcttcttcagctctgagaccaccgcagcccactccctagtggggacgccctactacatgtcaccggagaggatccatgagaacggctacaacttcaagtccgacatctggtccctgggctgtctgctgtacgagatggcagccctccagagccccttctatggagataagatgaatctcttctccctgtgccagaagatcgagcagtgtgactaccccccactccccggggagcactactccgagaagttacgagaactggtcagcatgtgcatctgccctgacccccaccagagacctgacatcggatacgtgcaccaggtggccaagcagatgcacatctggatgtccagcacctgagcgtggatgcaccgtgccttatcaaagccagcaccactttgccttacttgagtcgtcttctcttcgagtggccacctggtagcctagaacagctaagaccacagggttcagcaggttccccaaaaggctgcccagccttacagcagatgctgaaggcagagcagctgagggaggggcgctggccacatgtcactgatggtcagattccaaagtcctttctttatactgttgtggacaatctcagctgggtcaataagggcaggtggttcagcgagccacggcagccccctgtatctggattgtaatgtgaatctttagggtaattcctccagtgacctgtcaaggcttatgctaacaggagacttgcaggagaccgtgtgatttgtgtagtgagcctttgaaaatggttagtaccgggttcagtttagttcttagtatcttttcaatcaagctgtgtgcttaatttactctgttgtaaagggataaagtggaaatcatttttttccgtggagtggtgattctgctaacatttttatctacgttttataacttggtgagtgacgatgagagccctgcacctggccagagtgtcacaggcaaaaggcatcgggaagcaggagcatcttcttggcagccaggctgggccatcttctcctggacacctgctgtgtaccaggaacttcgtcacctccttgaatgctggcggttcatttcatgatcagtgttaagcattttcctccatgggaaggaagcatgggatatagaaaagcgaagggctgtcctttacaaattctggttctgcaacttcctagcgtgactttgggcttgggcaagtttcttagccgttctgagccttcatttcctcatctgtacaatgagattaatagtacctatcatctaccttcaggattgctgacagacagaatttgaaataaaatatgcaagttagctaatacaaaaagtagatgatccaaaaatggtagccactcacccttcacaaactgaagtccatggaccacggaagtcgagaattaatgtacacctgtatcatgtgtaggaaaccagaaatgtgttccttatttcttgttcccaaacaggattaactgtgaagactaatttataaatgtgaacctaagaaaactccacctctgaaggaaatcatttgaattttgtttttgtacgtaaagttaaccttccaattgtctgagctgtcgtcactgacttcatgacagtctggccctccagacaagagcagcgctggcatcgggcaggtgattcctgacacctgctgcctgcaggcattcactgaccaggcctttcctggaggaaacacccagggccgggcggctgctgtttccacacgtggactcggatctgctgtgacaccgtcagcccgacagtctctccatatgcagcctttcctctgtacttttctccatggttgaaataaaacagggtgactgggagttacttagaattcatgaagattttaaaaaaaaaaaaaa

SEQ ID NO: 86 - protein, 313 aa, Homo sapiens; identical to SEQ ID NO: 78

SEQ ID NO: 87 - DNA, 2153 bp, Homo sapiens
tccgccgccgcgcccgcctacaaggccctgagggagactgcggagggtgagtgcgcggtgggctcggctgaccgttggccctgcggccggcgccctaggctacctcccttcgcctccccgcgcctccccgcgcctccccgcctccccgcctccccgcctcctcggctctggttccaacaccccagcgccaagccggggaggcggggaggacttcttaagtgtgccgctcgggagcctcccgctcgtcccgccccgaggggcgtgaggaggggaggggctgcggacttcggactcgggcctggagaccgcctcctacccagagccggagcccgcaacccgctcaggcggcgacggagccatgtcgccgctgctggggctccggtccgagctgcaggacacctgcacctcgctgggactgatgctgtcggtggtgctgctcatggggctggcccgcgtagtcgcccggcagcagctgcacaggccggtggcccacgccttcgtcctggagtttctagccaccttccagctctgctgctgcacccacgagctgcaactgctgagcgaacagcaccccgcgcaccccacctggacgctgacgctcgtctacttcttctcgcttgtgcatggcctgactctggtgggcacgtccagcaacccgtgcggcgtgatgatgcagatgatgctggggggcatgtcccccgagacgggtgcggtgaggctattggctcagctggttagtgccctgtgcagcaggtactgcacaagcgccttgtggagcttgggtctgacccagtatcacgtcagcgagaggagcttcgcttgcaagaatcccatccgagtcgacttgctcaaagcggtcatcacagaggccgtctgctcctttctcttccacagcgctctgctgcacttccaggaagtccgaaccaagcttcgtatccacctgctggctgcactcatcacctttttggtctatgcaggaggaagtctaacaggagctgtatttaatccagctttggcactttcgctacatttcatgtgttttgatgaagcattccctcagttttttatagtatactggctggctccttctttaggtatattgttgatgattttgatgttcagctttttccttccatggctgcataacaaccatacaattaataaaaaggaataactgttccaaagactcagactaacatacaggacagtccagctggatgtgataaagattttatcacctcatatggaaaacaccggctgcactggattcatcagtgttaacttcctttgaggaagctgccttatagttttcatcactgggactttaaaaaaaaattactgtgaaaatgaggtattctgtacttctcagttaagacttgttctttgagtgatgtattaaatgctgctagaaaagcctcattacattaaatataaatcaatcttaaatgataattgttaactttgatgaaaaacgagtacaggatgagaagggaagtaaaggtgatagtaagatcaacgaatttgtgtatcaagtgtcacccaaatgaacagaatttttaactataaaagtacaaggcgtcaacttacagaactggggagaggatactttcagccaccacctcacaaaatgataccatcaagcagtgtcatctttcaacaggaaagttgcttttagaagtagaatatatattcactcacatgcaagcgatttcctacattttaagtacattaaaatctaatacctaaaatagtttctctaaatagacaatctcactagctccagccaagtggttattctttaatagaatataataaaacaaaacacccatacaaagtcaggatttaagcttttcacattctcctttgaaccaacagctagctaccttatgaagtagggagggcatgtatttttaatctccattttacagataaggaaactaagcctagatgggtttgctgccctggcttagatcacatagagccaaataccatctctagtcttcaacttcaatccaaaaattcttctcggtcacgattatgactaaagggaaatcaagggttcatagaaacattaaatactttataataacgttaaaacttgtttagaaattaactagtattttttgaggtttaaagaaccttccagttttact

SEQ ID NO: 88 - protein, 271 aa, Homo sapiens
MSPLLGLRSELQDTCTSLGLMLSVVLLMGLARVVARQQLHRPVAHAFVLEFLATFQLCCCTHELQLLSEQHPAHPTWTLTLVYFFSLVHGLTLVGTSSNPCGVMMQMMLGGMSPETGAVRLLAQLVSALCSRYCTSALWSLGLTQYHVSERSFACKNPIRVDLLKAVITEAVCSFLFHSALLHFQEVRTKLRIHLLAALITFLVYAGGSLTGAVFNPALALSLHFMCFDEAFPQFFIVYWLAPSLGILLMILMFSFFLPWLHNNHTINKKE

SEQ ID NO: 89 - DNA, 2473 bp, Homo sapiens
agggaggcggagcggaagccgagtgcgagggacgagcggagtaaaatctccacaagctgggaacaaacctcgtcccaactcccacccaccggcgtttctccagctcgatctggaggctgcttcgccagtgtgggacgcagctgacgcccgcttattagctctcgctgcgtcgccccggctcagaagctccgtggcggcggcgaccgtgacgagaagcccacggccagctcagttctcttctactttgggagagagagaaagtcagatgccccttttaaactccctcttcaaaactcatctcctgggtgactgagttaatagagtggatacaaccttgctgaagatgaagaatatacaatattgaggatatttttttcttttttttttcaagtcttgatttgtggcttacctcaagttaccatttttcagtcaagtctgtttgtttgcttcttcagaaatgttttttacaatctcaagaaaaaatatgtcccagaaattgagtttactgttgcttgtatttggactcatttggggattgatgttactgcactatacttttcaacaaccaagacatcaaagcagtgtcaagttacgtgagcaaatactagacttaagcaaaagatatgttaaagctctagcagaggaaaataagaacacagtggatgtcgagaacggtgcttctatggcaggatatgcggatctgaaaagaacaattgctgtccttctggatgacattttgcaacgattggtgaagctggagaacaaagttgactatattgttgtgaatggctcagcagccaacaccaccaatggtactagtgggaatttggtgccagtaaccacaaataaaagaacgaatgtctcgggcagtatcagatagcagttgaaaatcaccttgtgctgctccatccactgtggattatatcctatggcagaaaagctttataattgctggcttaggacagagcaatactttacaataaaagctctacacattttcaaggagtatgctggattcatggaactctaattctgtacataaaaattttaaagttatttgtttgctttcaggcaagtctgttcaatgctgtactatgtccttaaagagaatttggtaatttggttgatgtggtaagcagataggtgagttttgtataaatcttttgtgtttgagatcaagctgaaatgaaaacactgaaaaacatggattcatttctataacacatttatttaagtatataacacgttttttggacaagtgaagaatgtttaatcattctgtcatttgttctcaatagatgtaactgttagactacggctatttgaaaaaatgtgcttattgtactatattttgttattccaattatgagcagagaaaggaaatataatgttgaaaataatgttttgaaatcatgacccaaagaatgtattgatttgcactatccttcagaataactgaaggttaattattgtatatttttaaaaattacacttataagagtataatcttgaaatgggtagcagccactgtccattacctatcgtaaacattggggcaatttaataacagcattaaaatagttgtaaactctaatcttatacttattgaagaataaaagatatttttatgatgagagtaacaataaagtattcatgatttttcacatacatgaatgttcatttaaaagtttaatcctttgagtgtctatgctatcaggaaagcacattatttccatatttgggttaattttgcttttattatattggtctaggaggaagggactttggagaatggaactcttgaggactttagccaggtgtatataataaaggtacttttgtgctgcattaaattgcttggaaaatgttaacattatattatataagagtatcctttatgaaattttgaatttgtataacagatgcattagatattcattttatataatggccacttaaaataagaacatttaaaatataaactatgaagattgactatcttttcaggaaaaaagctgtatatagcacagggaaccctaatcttgggtaattctagtataaaacaaattatacttttatttaaatttcccttgtagcaaatctaattgccacatggtgccctatatttcatagtatttattctctatagtaactgcttaagtgcagctagcttctagatttagactatatagaatttagatattgtattgttcgtcattataatatgctaccacatgtagcaataattacaatattttattaaaataaatatgtgaaatattgtttcatgaaagacagatttccaaatctctcttctcttctctgtactgtctacctttatgtgaagaaattaattatatgccattgccaggtagaagtttggaataattgtttagtctctcctattagatgtggacatttttgtttttgtttttgttttcagggatgaaataaaatatattatttctaccta

SEQ ID NO: 90 - protein, 140 aa, Homo sapiens
MFFTISRKNMSQKLSLLLLVFGLIWGLMLLHYTFQQPRHQSSVKLREQILDLSKRYVKALAEENKNTVDVENGASMAGYADLKRTIAVLLDDILQRLVKLENKVDYIVVNGSAANTTNGTSGNLVPVTTNKRTNVSGSIR

SEQ ID NO: 91 - DNA, 4553 bp, Homo sapiens
gagccaggcgggggcggagggggaggctggcagcggagctttgaatagggaagttttgcaggggttacgtttgcagtcagtccggtgtttgcaaatattgtgtgggctccgcgcgctgcgggctgcgggagggtccggccgggcgtctctgcgagcctggagtttgcatgaaactttcacctgcgctccggggagactttcggctccggctcccaccgcgcgcctcgccgccctcgcgaccgcgggctccgtccaacccggcccgacatggacgtgctccccatgtgcagcatcttccaggagctccagatcgtgcacgagaccggctacttctcggcgctgccgtctctggaggagtactggcaacagacctgcctagagctggaacgttacctccagagcgagccctgctatgtttcagcctcagaaatcaaatttgacagccaggaagatctgtggaccaaaatcattctggctcgggagaaaaaggaggaatccgaactgaagatatcttccagtcctccagaggacactctcatcagcccgagcttttgttacaacttagagaccaacagcctgaactcagatgtcagcagcgaatcctctgacagctccgaggaactttctcccacggccaagtttacctccgaccccattggcgaagttttggtcagctcgggaaaattgagctcctctgtcacctccacgcctccatcttctccggaactgagcagggaaccttctcaactgtggggttgcgtgcccggggagctgccctcgccagggaaggtgcgcagcgggacttcggggaagccaggagaaaagccttacagatgctcatgggaagggtgtgagtggcgttttgcaagaagtgatgagttaaccaggcacttccgaaagcacaccggggccaagccttttaaatgctcccactgtgacaggtgtttttccaggtctgaccacctggccctgcacatgaagaggcacctctgagggagcagagaggtggatcctgtaggctaaaaggcttccaggctgagagccggccgtggaaggagggatgcgtgttccagccaaagcatgccgttctgcaccctacccagttgcctccagggcctctccttggaaggtcttttgagggctaaaaaggtcctgtaagaagcggcatagcacccgtggtgcatggtatgtgggtgaccctggactcgccactggtacccgcccttccgagcggcgcctaagcctttgccgtgagcatgcacactgagaatgctaatggttgggttgattgtatgttgaggatctattactgaccgtatgatgaggccaactttttttccttgtggttagcaagactgcaagagatggaaaaaaagtagtttgaatgttttgtgtgtaaggagtataccatgagatgagatgaccaccaatcatttccttggggggagggggtgtctgcaccttagaaaaaaaaagaaaaatcaaaaaaacaaaaaaacaaaaacaaaaaaagaaggaaaatcttggagggtgggcgtgggaactcaggaccccagagtggcgagtggtgtggggagggagagcctctctcccccttttctgtgtgagaggaactcttagtgtctggtgcagctattaaatgtgcaatgtgtcaagtagcttgttttacacgctacaacatagctcatttgtaacccattgtataagctgtgtatttacaaatataacacaacaatttaacttttccttagaatacaaaaagtcatgcatggtctggggaactatatgcttttccatttttaagtcaggactgcaatactgattccagttaatgagcagctaagatccaatctgtctaatacagtgaccccctagccatccgggcctggcaatatacaattttttttcccctccaagtttgtaacactccccttccagaaaggcattgtgcaacacaggattatttttaaatgattctgaatttgaattaactttttggagaattctgtgatgcccttagaagaaattggacacgtattgagtgtcacaaagctggggctgggaattgctggtctaatgtttcattagacttaagaacctaaaatttttctcagttgggtggataaaaccactaacgcttagaaactgttttctcatgcagctatgtttctcttatttatgccttgaggactaatttctggttttctagctgttaatgcactgttgaccttcataatggtgccttacgcaagcgatcccttctgtgggggtctcatacaggggtgtgggcgatgcatgctttattaaggctcttgtttcacctggcagtgtactgtatcaacgtataatacagaaaaaaaatctctttaaggtcctccttcacaaagacatagagtgaaactccctttacatgtcagtatttgttcaacactttaggcaacttgactgtcagtgttaaaatggaaaacaggaaaatggaaaaatctgaccaattctgccaccttgagactttcatatagaccttgcacaacaattgtatagatcacacaccggctgtatttaatatgtaacattttcacacatattaaagatacagaagtattaaaaaacccccaatgttaatgtatttgcttaaaaggcacaagtttcacatatctgtctagctatctgttggtaatacagaaagtatactacttttttaaaaaagtgggcagaattcttgtgtatgtatatttgtgtgtacagtatgtgtatgtgtgtatatatatatattatatatatagataatatataaatattttttttaaggagaaactagaatgtttagctagaaaattccacagcctgtgaagaaatatttcaaaatggccataaaggaggtaaaaatgaaaaccataacctaacttttatagaggctttatctttaatttaacgatgtgcggaggactttcttgcttgaatctgttccgggctgtctgctctgtccatcaaatgggcaggtctggaatggggcaccttcggccgttcagaagtggcctgaacagaatgctggaacccaggctggactcggacacactaaggttttgattttgaatttcagccttattagaagatctaacctaagagtaagctaaccacagggattcttttgtagaacactttttatgcagatgaagctattttttccagcaagtagattcttccagtttttccaaggagtaatttccccgaattggcataccacggcgtggacagctgatatttcacccagctgctggcttgtgggtgtggctctttgctttatatatatatacacacatgtgagtctggctgggctggtattttgtttgatcttcctggaaatgagcagtgactaacgctcacataactggttttttttttatctgggctgatgaatacatttacctaagaaactcatttcgttttacttaagaggggaagtgcagttttcttttggcagttcagaatccaagcacttgatttgctgggtttggaaaactccttttttggccttctatgtgcttagccataacaattccattaagcaagaaggtaagcaaaagacaaaaaaaaaaaaaggaaaaaaaaaaacttgcactggcttgtctcacttacgaaacatgtcggagctgtttgcctgggtggggctgggtaccgtacctgtcaatgcctgtgattttcataattagcacgtacataaagaagtacattctgttcaggtgataactgagcctcaatcaagcagaaactttttgcttgaaattaaaaaaaaatttctattagtgaaatttcttttttttttttttttggaagcaccctgttatctaaagaatctttgtaagatttttgtaaaattttgttttacaagattttatttgaaattgttttttgcaagattgttatatttctgtatgaatgtattttttattggaataacataaaagaattcttatcagcatcttgagtctggttgttttttttgggggaagggggttgttggaacagattcctcctgcattcatcaccctggcttcctcctgggggcaaatcttcattgagcaaccctgagaacaactcaccgacctcagccccttcctctttccacagcctgtcctgggagctggagaggatgtcagcgagcctgacattgccctccctgaatgcatcaaatactcttctccaaggactgacaaaaacaaccccccggctgtgggcacagtagggaaccatgccggtttgatcttccattgctcaagccagggaatgcattgcagaggcacctgcacaacgacaaacttgagtgtttccctgccacttctgtgcctccacagcctgctccagttccgcagctagagctgggcctaccttccccagccagccctgccacacacctggctgaggcatgtctgggaggggtggaggaggcagagggactccaggccagagggctgttctcacaacctcagcccactctcagtcaaggagggcagaaaataaaagatgacatcactgccaaaaaaaaaaaaaaaaaa

SEQ ID NO: 92 - protein, 241 aa, Homo sapiens
MDVLPMCSIFQELQIVHETGYFSALPSLEEYWQQTCLELERYLQSEPCYVSASEIKFDSQEDLWTKIILAREKKEESELKISSSPPEDTLISPSFCYNLETNSLNSDVSSESSDSSEELSPTAKFTSDPIGEVLVSSGKLSSSVTSTPPSSPELSREPSQLWGCVPGELPSPGKVRSGTSGKPGEKPYRCSWEGCEWRFARSDELTRHFRKHTGAKPFKCSHCDRCFSRSDHLALHMKRHL

SEQ ID NO: 93 - DNA, 4555 bp, Homo sapiens
gagccaggcgggggcggagggggaggctggcagcggagctttgaatagggaagttttgcaggggttacgtttgcagtcagtccggtgtttgcaaatattgtgtgggctccgcgcgctgcgggctgcgggagggtccggccgggcgtctctgcgagcctggagtttgcatgaaactttcacctgcgctccggggagactttcggctccggctcccaccgcgcgcctcgccgccctcgcgaccgcgggctccgtccaacccggcccgacatggacgtgctccccatgtgcagcatcttccaggagctccagatcgtgcacgagaccggctacttctcggcgctgccgtctctggaggagtactggcaacagacctgcctagagctggaacgttacctccagagcgagccctgctatgtttcagcctcagaaatcaaatttgacagccaggaagatctgtggaccaaaatcattctggctcgggagaaaaaggaggaatccgaactgaagatatcttccagtcctccagaggacactctcatcagcccgagcttttgttacaacttagagaccaacagcctgaactcagatgtcagcagcgaatcctctgacagctccgaggaactttctcccacggccaagtttacctccgaccccattggcgaagttttggtcagctcgggaaaattgagctcctctgtcacctccacgcctccatcttctccggaactgagcagggaaccttctcaactgtggggttgcgtgcccggggagctgccctcgccagggaaggtgcgcagcgggacttcggggaagccaggtgacaagggaaatggcgatgcctcccccgacggcaggaggagggtgcaccggtgccactttaacggctgcaggaaagtttacaccaaaagctcccacttgaaagcacaccagcggacgcacacaggtgtttttccaggtctgaccacctggccctgcacatgaagaggcacctctgagggagcagagaggtggatcctgtaggctaaaaggcttccaggctgagagccggccgtggaaggagggatgcgtgttccagccaaagcatgccgttctgcaccctacccagttgcctccagggcctctccttggaaggtcttttgagggctaaaaaggtcctgtaagaagcggcatagcacccgtggtgcatggtatgtgggtgaccctggactcgccactggtacccgcccttccgagcggcgcctaagcctttgccgtgagcatgcacactgagaatgctaatggttgggttgattgtatgttgaggatctattactgaccgtatgatgaggccaactttttttccttgtggttagcaagactgcaagagatggaaaaaaagtagtttgaatgttttgtgtgtaaggagtataccatgagatgagatgaccaccaatcatttccttggggggagggggtgtctgcaccttagaaaaaaaaagaaaaatcaaaaaaacaaaaaaacaaaaacaaaaaaagaaggaaaatcttggagggtgggcgtgggaactcaggaccccagagtggcgagtggtgtggggagggagagcctctctcccccttttctgtgtgagaggaactcttagtgtctggtgcagctattaaatgtgcaatgtgtcaagtagcttgttttacacgctacaacatagctcatttgtaacccattgtataagctgtgtatttacaaatataacacaacaatttaacttttccttagaatacaaaaagtcatgcatggtctggggaactatatgcttttccatttttaagtcaggactgcaatactgattccagttaatgagcagctaagatccaatctgtctaatacagtgaccccctagccatccgggcctggcaatatacaattttttttcccctccaagtttgtaacactccccttccagaaaggcattgtgcaacacaggattatttttaaatgattctgaatttgaattaactttttggagaattctgtgatgcccttagaagaaattggacacgtattgagtgtcacaaagctggggctgggaattgctggtctaatgtttcattagacttaagaacctaaaatttttctcagttgggtggataaaaccactaacgcttagaaactgttttctcatgcagctatgtttctcttatttatgccttgaggactaatttctggttttctagctgttaatgcactgttgaccttcataatggtgccttacgcaagcgatcccttctgtgggggtctcatacaggggtgtgggcgatgcatgctttattaaggctcttgtttcacctggcagtgtactgtatcaacgtataatacagaaaaaaaatctctttaaggtcctccttcacaaagacatagagtgaaactccctttacatgtcagtatttgttcaacactttaggcaacttgactgtcagtgttaaaatggaaaacaggaaaatggaaaaatctgaccaattctgccaccttgagactttcatatagaccttgcacaacaattgtatagatcacacaccggctgtatttaatatgtaacattttcacacatattaaagatacagaagtattaaaaaacccccaatgttaatgtatttgcttaaaaggcacaagtttcacatatctgtctagctatctgttggtaatacagaaagtatactacttttttaaaaaagtgggcagaattcttgtgtatgtatatttgtgtgtacagtatgtgtatgtgtgtatatatatatattatatatatagataatatataaatattttttttaaggagaaactagaatgtttagctagaaaattccacagcctgtgaagaaatatttcaaaatggccataaaggaggtaaaaatgaaaaccataacctaacttttatagaggctttatctttaatttaacgatgtgcggaggactttcttgcttgaatctgttccgggctgtctgctctgtccatcaaatgggcaggtctggaatggggcaccttcggccgttcagaagtggcctgaacagaatgctggaacccaggctggactcggacacactaaggttttgattttgaatttcagccttattagaagatctaacctaagagtaagctaaccacagggattcttttgtagaacactttttatgcagatgaagctattttttccagcaagtagattcttccagtttttccaaggagtaatttccccgaattggcataccacggcgtggacagctgatatttcacccagctgctggcttgtgggtgtggctctttgctttatatatatatacacacatgtgagtctggctgggctggtattttgtttgatcttcctggaaatgagcagtgactaacgctcacataactggttttttttttatctgggctgatgaatacatttacctaagaaactcatttcgttttacttaagaggggaagtgcagttttcttttggcagttcagaatccaagcacttgatttgctgggtttggaaaactccttttttggccttctatgtgcttagccataacaattccattaagcaagaaggtaagcaaaagacaaaaaaaaaaaaaggaaaaaaaaaaacttgcactggcttgtctcacttacgaaacatgtcggagctgtttgcctgggtggggctgggtaccgtacctgtcaatgcctgtgattttcataattagcacgtacataaagaagtacattctgttcaggtgataactgagcctcaatcaagcagaaactttttgcttgaaattaaaaaaaaatttctattagtgaaatttcttttttttttttttttggaagcaccctgttatctaaagaatctttgtaagatttttgtaaaattttgttttacaagattttatttgaaattgttttttgcaagattgttatatttctgtatgaatgtattttttattggaataacataaaagaattcttatcagcatcttgagtctggttgttttttttgggggaagggggttgttggaacagattcctcctgcattcatcaccctggcttcctcctgggggcaaatcttcattgagcaaccctgagaacaactcaccgacctcagccccttcctctttccacagcctgtcctgggagctggagaggatgtcagcgagcctgacattgccctccctgaatgcatcaaatactcttctccaaggactgacaaaaacaaccccccggctgtgggcacagtagggaaccatgccggtttgatcttccattgctcaagccagggaatgcattgcagaggcacctgcacaacgacaaacttgagtgtttccctgccacttctgtgcctccacagcctgctccagttccgcagctagagctgggcctaccttccccagccagccctgccacacacctggctgaggcatgtctgggaggggtggaggaggcagagggactccaggccagagggctgttctcacaacctcagcccactctcagtcaaggagggcagaaaataaaagatgacatcactgccaaaaaaaaaaaaaaaaaa

SEQ ID NO: 94 - protein, 237 aa, Homo sapiens
MDVLPMCSIFQELQIVHETGYFSALPSLEEYWQQTCLELERYLQSEPCYVSASEIKFDSQEDLWTKIILAREKKEESELKISSSPPEDTLISPSFCYNLETNSLNSDVSSESSDSSEELSPTAKFTSDPIGEVLVSSGKLSSSVTSTPPSSPELSREPSQLWGCVPGELPSPGKVRSGTSGKPGDKGNGDASPDGRRRVHRCHFNGCRKVYTKSSHLKAHQRTHTGVFPGLTTWPCT

SEQ ID NO: 95 - DNA, 4679 bp, Homo sapiens
gagccaggcgggggcggagggggaggctggcagcggagctttgaatagggaagttttgcaggggttacgtttgcagtcagtccggtgtttgcaaatattgtgtgggctccgcgcgctgcgggctgcgggagggtccggccgggcgtctctgcgagcctggagtttgcatgaaactttcacctgcgctccggggagactttcggctccggctcccaccgcgcgcctcgccgccctcgcgaccgcgggctccgtccaacccggcccgacatggacgtgctccccatgtgcagcatcttccaggagctccagatcgtgcacgagaccggctacttctcggcgctgccgtctctggaggagtactggcaacagacctgcctagagctggaacgttacctccagagcgagccctgctatgtttcagcctcagaaatcaaatttgacagccaggaagatctgtggaccaaaatcattctggctcgggagaaaaaggaggaatccgaactgaagatatcttccagtcctccagaggacactctcatcagcccgagcttttgttacaacttagagaccaacagcctgaactcagatgtcagcagcgaatcctctgacagctccgaggaactttctcccacggccaagtttacctccgaccccattggcgaagttttggtcagctcgggaaaattgagctcctctgtcacctccacgcctccatcttctccggaactgagcagggaaccttctcaactgtggggttgcgtgcccggggagctgccctcgccagggaaggtgcgcagcgggacttcggggaagccaggtgacaagggaaatggcgatgcctcccccgacggcaggaggagggtgcaccggtgccactttaacggctgcaggaaagtttacaccaaaagctcccacttgaaagcacaccagcggacgcacacaggagaaaagccttacagatgctcatgggaagggtgtgagtggcgttttgcaagaagtgatgagttaaccaggcacttccgaaagcacaccggggccaagccttttaaatgctcccactgtgacaggtgtttttccaggtctgaccacctggccctgcacatgaagaggcacctctgagggagcagagaggtggatcctgtaggctaaaaggcttccaggctgagagccggccgtggaaggagggatgcgtgttccagccaaagcatgccgttctgcaccctacccagttgcctccagggcctctccttggaaggtcttttgagggctaaaaaggtcctgtaagaagcggcatagcacccgtggtgcatggtatgtgggtgaccctggactcgccactggtacccgcccttccgagcggcgcctaagcctttgccgtgagcatgcacactgagaatgctaatggttgggttgattgtatgttgaggatctattactgaccgtatgatgaggccaactttttttccttgtggttagcaagactgcaagagatggaaaaaaagtagtttgaatgttttgtgtgtaaggagtataccatgagatgagatgaccaccaatcatttccttggggggagggggtgtctgcaccttagaaaaaaaaagaaaaatcaaaaaaacaaaaaaacaaaaacaaaaaaagaaggaaaatcttggagggtgggcgtgggaactcaggaccccagagtggcgagtggtgtggggagggagagcctctctcccccttttctgtgtgagaggaactcttagtgtctggtgcagctattaaatgtgcaatgtgtcaagtagcttgttttacacgctacaacatagctcatttgtaacccattgtataagctgtgtatttacaaatataacacaacaatttaacttttccttagaatacaaaaagtcatgcatggtctggggaactatatgcttttccatttttaagtcaggactgcaatactgattccagttaatgagcagctaagatccaatctgtctaatacagtgaccccctagccatccgggcctggcaatatacaattttttttcccctccaagtttgtaacactccccttccagaaaggcattgtgcaacacaggattatttttaaatgattctgaatttgaattaactttttggagaattctgtgatgcccttagaagaaattggacacgtattgagtgtcacaaagctggggctgggaattgctggtctaatgtttcattagacttaagaacctaaaatttttctcagttgggtggataaaaccactaacgcttagaaactgttttctcatgcagctatgtttctcttatttatgccttgaggactaatttctggttttctagctgttaatgcactgttgaccttcataatggtgccttacgcaagcgatcccttctgtgggggtctcatacaggggtgtgggcgatgcatgctttattaaggctcttgtttcacctggcagtgtactgtatcaacgtataatacagaaaaaaaatctctttaaggtcctccttcacaaagacatagagtgaaactccctttacatgtcagtatttgttcaacactttaggcaacttgactgtcagtgttaaaatggaaaacaggaaaatggaaaaatctgaccaattctgccaccttgagactttcatatagaccttgcacaacaattgtatagatcacacaccggctgtatttaatatgtaacattttcacacatattaaagatacagaagtattaaaaaacccccaatgttaatgtatttgcttaaaaggcacaagtttcacatatctgtctagctatctgttggtaatacagaaagtatactacttttttaaaaaagtgggcagaattcttgtgtatgtatatttgtgtgtacagtatgtgtatgtgtgtatatatatatattatatatatagataatatataaatattttttttaaggagaaactagaatgtttagctagaaaattccacagcctgtgaagaaatatttcaaaatggccataaaggaggtaaaaatgaaaaccataacctaacttttatagaggctttatctttaatttaacgatgtgcggaggactttcttgcttgaatctgttccgggctgtctgctctgtccatcaaatgggcaggtctggaatggggcaccttcggccgttcagaagtggcctgaacagaatgctggaacccaggctggactcggacacactaaggttttgattttgaatttcagccttattagaagatctaacctaagagtaagctaaccacagggattcttttgtagaacactttttatgcagatgaagctattttttccagcaagtagattcttccagtttttccaaggagtaatttccccgaattggcataccacggcgtggacagctgatatttcacccagctgctggcttgtgggtgtggctctttgctttatatatatatacacacatgtgagtctggctgggctggtattttgtttgatcttcctggaaatgagcagtgactaacgctcacataactggttttttttttatctgggctgatgaatacatttacctaagaaactcatttcgttttacttaagaggggaagtgcagttttcttttggcagttcagaatccaagcacttgatttgctgggtttggaaaactccttttttggccttctatgtgcttagccataacaattccattaagcaagaaggtaagcaaaagacaaaaaaaaaaaaaggaaaaaaaaaaacttgcactggcttgtctcacttacgaaacatgtcggagctgtttgcctgggtggggctgggtaccgtacctgtcaatgcctgtgattttcataattagcacgtacataaagaagtacattctgttcaggtgataactgagcctcaatcaagcagaaactttttgcttgaaattaaaaaaaaatttctattagtgaaatttcttttttttttttttttggaagcaccctgttatctaaagaatctttgtaagatttttgtaaaattttgttttacaagattttatttgaaattgttttttgcaagattgttatatttctgtatgaatgtattttttattggaataacataaaagaattcttatcagcatcttgagtctggttgttttttttgggggaagggggttgttggaacagattcctcctgcattcatcaccctggcttcctcctgggggcaaatcttcattgagcaaccctgagaacaactcaccgacctcagccccttcctctttccacagcctgtcctgggagctggagaggatgtcagcgagcctgacattgccctccctgaatgcatcaaatactcttctccaaggactgacaaaaacaaccccccggctgtgggcacagtagggaaccatgccggtttgatcttccattgctcaagccagggaatgcattgcagaggcacctgcacaacgacaaacttgagtgtttccctgccacttctgtgcctccacagcctgctccagttccgcagctagagctgggcctaccttccccagccagccctgccacacacctggctgaggcatgtctgggaggggtggaggaggcagagggactccaggccagagggctgttctcacaacctcagcccactctcagtcaaggagggcagaaaataaaagatgacatcactgccaaaaaaaaaaaaaaaaaa

SEQ ID NO: 96 - protein, 283 aa, Homo sapiens
MDVLPMCSIFQELQIVHETGYFSALPSLEEYWQQTCLELERYLQSEPCYVSASEIKFDSQEDLWTKIILAREKKEESELKISSSPPEDTLISPSFCYNLETNSLNSDVSSESSDSSEELSPTAKFTSDPIGEVLVSSGKLSSSVTSTPPSSPELSREPSQLWGCVPGELPSPGKVRSGTSGKPGDKGNGDASPDGRRRVHRCHFNGCRKVYTKSSHLKAHQRTHTGEKPYRCSWEGCEWRFARSDELTRHFRKHTGAKPFKCSHCDRCFSRSDHLALHMKRHL

SEQ ID NO: 97 - DNA, 3223 bp, Homo sapiens
tcaatcccttaattaaatagcttcccctctacaggcttttgaagtggtagcagttcctcctaactcctgccagaaacagctctcctcaacatgagagctgcacccctcctcctggccagggcagcaagccttagccttggcttcttgtttctgctttttttctggctagaccgaagtgtactagccaaggagttgaagtttgtgactttggtgtttcggcatggagaccgaagtcccattgacacctttcccactgaccccataaaggaatcctcatggccacaaggatttggccaactcacccagctgggcatggagcagcattatgaacttggagagtatataagaaagagatatagaaaattcttgaatgagtcctataaacatgaacaggtttatattcgaagcacagacgttgaccggactttgatgagtgctatgacaaacctggcagccctgtttcccccagaaggtgtcagcatctggaatcctatcctactctggcagcccatcccggtgcacacagttcctctttctgaagatcagttgctatacctgcctttcaggaactgccctcgttttcaagaacttgagagtgagactttgaaatcagaggaattccagaagaggctgcacccttataaggattttatagctaccttgggaaaactttcaggattacatggccaggacctttttggaatttggagtaaagtctacgaccctttatattgtgagagtgttcacaatttcactttaccctcctgggccactgaggacaccatgactaagttgagagaattgtcagaattgtccctcctgtccctctatggaattcacaagcagaaagagaaatctaggctccaagggggtgtcctggtcaatgaaatcctcaatcacatgaagagagcaactcagataccaagctacaaaaaactcatcatgtattctgcgcatgacactactgtgagtggcctacagatggcgctagatgtttacaacggactccttcctccctatgcttcttgccacttgacggaattgtactttgagaagggggagtactttgtggagatgtactatcggaatgagacgcagcacgagccgtatcccctcatgctacctggctgcagccccagctgtcctctggagaggtttgctgagctggttggccctgtgatccctcaagactggtccacggagtgtatgaccacaaacagccatcaaggtactgaagacagtacagattagtgtgcacagagatctctgtagaaggagtagctgccctttctcagggcagatgatgctttgagaacatactttggccattacccccagctttgaggaaaatgggctttggatgattattttatgttttagggacccccaacctcaggcaattcctacctcttcacctgaccctgcccccacttgccataaaacttagctaagttttgttttgtttttcagcgttaatgtaaaggggcagcagtgccaaaatataatcagagataaagcttaggtcaaagttcatagagttcccatgaactatatgactggccacacaggatcttttgtatttaaggattctgagattttgcttgagcaggattagataaggctgttctttaaatgtctgaaatggaacagatttcaaaaaaaaaccccacaatctaggatgggaacaaggaaggaaagatgtgaataggctgatgggcaaaaaaccaatttacccatcagttccagccttctctcaaggagaggcaaagaaaggagatacagtggagacatctggaaagttttctccactggaaaactgctactatctgtttttatatttctgttaaaatatatgaggctacagaactaaaaattaaaacctctttgtgtcccttggtcctggaacatttatgttccttttaaagaaacaaaaatcaaactttacagaaagatttgatgtatgtaatacatatagcagctcttgaagtatatatatcatagcaaataagtcatctgatgagaacaagctatttgggcacaacacatcaggaaagagagcaccacgtgatggagtttctctagaagctccagtgataagagatgttgactctaaagttgatttaaggccaggcatggtggtttacgcctataatcccagcattttgggagtccgaggtgggcagatcacttgagctcaggaggtcaagatcagcctgggcaacatggtgaaacctggtctctacataaaatacaaaaacttagatgggcatggtggtgtgtgcctatagtcccactacttgtggggctaaggcaggaggatcacttgagccccggaggtcgaggctacagtgagccaagagtgcactactgtactccagccagggcaagagagcgagaccctgtctcaataaataaataaataaataaataaataaataaataaataaataaaaacaaagttgattaagaaaggaagtataggccaggcacagtggctcacacctgtaatccttgcattttggaaggctgaggcaggaggatcactttaggcctggtgtgttcaagaccagcctggtcaacatagtgagacactgtctctaccaaaaaaaggaaggaagggacacatatcaaactgaaacaaaattagaaatgtaattatgttctaagtgcctccaagttcaaaacttattggaatgttgagagtgtggttacgaaatacgttaggaggacaaaaggaatgtgtaagtctttaatgccgatatcttcagaaaacctaagcaaacttacaggtcctgctgaaactgcccactctgcaagaagaaatcatgatatagctttgccatgtggcagatctacatgtctagagaacactgtgctctattaccattatggataaagatgagatggtttctagagatggtttctactggctgccagaatctagagcaaagccatccccgctcctggttggtcacagaatgactgacaaagacatcgattgatatgcttctttgtgttatttccctcccaagtaaatgtttgtccttgggtccattttctatgcttgtaactgtcttctagcagtgagccaaatgtaaaatagtgaataaagtcattattaggaagttcaaaagcattgcttttataatgaacttagaaaaacgtatgtgtgtgtgtttaattagaataaaattcctctaggcagatttcaggagctccaaaa

SEQ ID NO: 98 - protein, 386 aa, Homo sapiens
MRAAPLLLARAASLSLGFLFLLFFWLDRSVLAKELKFVTLVFRHGDRSPIDTFPTDPIKESSWPQGFGQLTQLGMEQHYELGEYIRKRYRKFLNESYKHEQVYIRSTDVDRTLMSAMTNLAALFPPEGVSIWNPILLWQPIPVHTVPLSEDQLLYLPFRNCPRFQELESETLKSEEFQKRLHPYKDFIATLGKLSGLHGQDLFGIWSKVYDPLYCESVHNFTLPSWATEDTMTKLRELSELSLLSLYGIHKQKEKSRLQGGVLVNEILNHMKRATQIPSYKKLIMYSAHDTTVSGLQMALDVYNGLLPPYASCHLTELYFEKGEYFVEMYYRNETQHEPYPLMLPGCSPSCPLERFAELVGPVIPQDWSTECMTTNSHQGTEDSTD

SEQ ID NO: 99 - DNA, 1842 bp, Homo sapiens
tcaatcccttaattaaatagcttcccctctacaggcttttgaagtggtagcagttcctcctaactcctgccagaaacagctctcctcaacatgagagctgcacccctcctcctggccagggcagcaagccttagccttggcttcttgtttctgctttttttctggctagaccgaagtgtactagccaaggagttgaagtttgtgactttggtgtttcggcatggagaccgaagtcccattgacacctttcccactgaccccataaaggaatcctcatggccacaaggatttggccaactcacccagctgggcatggagcagcattatgaacttggagagtatataagaaagagatatagaaaattcttgaatgagtcctataaacatgaacaggtttatattcgaagcacagacgttgaccggactttgatgagtgctatgacaaacctggcagccctgtttcccccagaaggtgtcagcatctggaatcctatcctactctggcagcccatcccggtgcacacagttcctctttctgaagatcagttgctatacctgcctttcaggaactgccctcgttttcaagaacttgagagtgagactttgaaatcagaggaattccagaagaggctgcacccttataaggattttatagctaccttgggaaaactttcaggattacatggccaggacctttttggaatttggagtaaagtctacgaccctttatattgtgagagtgttcacaatttcactttaccctcctgggccactgaggacaccatgactaagttgagagaattgtcagaattgtccctcctgtccctctatggaattcacaagcagaaagagaaatctaggctccaagggggtgtcctggtcaatgaaatcctcaatcacatgaagagagcaactcagataccaagctacaaaaaactcatcatgtattctgcgcatgacactactgtgagtggcctacagatggcgctagatgtttacaacggactccttcctccctatgcttcttgccacttgacggaattgtactttgagaagggggagtactttgtggagatgtactatcggaatgagacgcagcacgagccgtatcccctcatgctacctggctgcagccccagctgtcctctggagaggtttgctgagctggttggccctgtgatccctcaagactggtccacggagtgtatgaccacaaacagccatcaagttctaaaggtcatctttgctgttgccttttgcctgatatctgctgtcctaatggtactactgtttatccacattcgccgtggactctgctggcagagagaatcctatgggaacatctgaacagacagctggataagccaggccaacctcctgtgacacagcatctctcagtggtgccgcatctaaaggacaggcttttgccatgtgggcattgccatcctcacaccctgccttttgaatctgcccagagcagggtctgaactcacagtgacccacaggctgctgctggatgaacactcaggctacctaggtcttctcataatggagtggtagtgcaggctgcttgttcagctagaaagaggctgttatgcataggatggttgtattctctgccacagttgtccggagagaaataagaagccaaactccaatcagccttttacctgcaaagagtgaagggtgagaaggtggacaaagacatagattagaaaaatactggatattgggggaagttagactagaagtattattatacagggtgattcttacgaaagaagacccaatcataaattataaataaactttttatttagctattaaaaaaaaaaaaaaaaa

SEQ ID NO: 100 - protein, 418 aa, Homo sapiens
MRAAPLLLARAASLSLGFLFLLFFWLDRSVLAKELKFVTLVFRHGDRSPIDTFPTDPIKESSWPQGFGQLTQLGMEQHYELGEYIRKRYRKFLNESYKHEQVYIRSTDVDRTLMSAMTNLAALFPPEGVSIWNPILLWQPIPVHTVPLSEDQLLYLPFRNCPRFQELESETLKSEEFQKRLHPYKDFIATLGKLSGLHGQDLFGIWSKVYDPLYCESVHNFTLPSWATEDTMTKLRELSELSLLSLYGIHKQKEKSRLQGGVLVNEILNHMKRATQIPSYKKLIMYSAHDTTVSGLQMALDVYNGLLPPYASCHLTELYFEKGEYFVEMYYRNETQHEPYPLMLPGCSPSCPLERFAELVGPVIPQDWSTECMTTNSHQVLKVIFAVAFCLISAVLMVLLFIHIRRGLCWQRESYGNI

SEQ ID NO: 101 - DNA, 2246 bp, Homo sapiens
aaagtccgggggagccggtcccgggcagccgctcagccccctgcccctcgccgcccgccgcctgcctgggccgggccgaggatgcggcgcagcgcctcggcggccaggcttgctcccctccggcacgcctgctaacttcccccgctacgtccccgttcgcccgccgggccgccccgtctccccgcgccctccgggtcgggtcctccaggagcgccaggcgctgccgccgtgtgccctccgccgctcgcccgcgcgcccgcgctccccgcctgcgcccagcgccccgcgcccgcgcccagtcctcgggcggtcatgctgcccctctgcctcgtggccgccctgctgctggccgccgggcccgggccgagcctgggcgacgaagccatccactgcccgccctgctccgaggagaagctggcgcgctgccgcccccccgtgggctgcgaggagctggtgcgagagccgggctgcggctgttgcgccacttgcgccctgggcttggggatgccctgcggggtgtacaccccccgttgcggctcgggcctgcgctgctacccgccccgaggggtggagaagcccctgcacacactgatgcacgggcaaggcgtgtgcatggagctggcggagatcgaggccatccaggaaagcctgcagccctctgacaaggacgagggtgaccaccccaacaacagcttcagcccctgtagcgcccatgaccgcaggtgcctgcagaagcacttcgccaaaattcgagaccggagcaccagtgggggcaagatgaaggtcaatggggcgccccgggaggatgcccggcctgtgccccagggctcctgccagagcgagctgcaccgggcgctggagcggctggccgcttcacagagccgcacccacgaggacctctacatcatccccatccccaactgcgaccgcaacggcaacttccaccccaagcagtgtcacccagctctggatgggcagcgtggcaagtgctggtgtgtggaccggaagacgggggtgaagcttccggggggcctggagccaaagggggagctggactgccaccagctggctgacagctttcgagagtgaggcctgccagcaggccagggactcagcgtcccctgctactcctgtgctctggaggctgcagagctgacccagagtggagtctgagtctgagtcctgtctctgcctgcggcccagaagtttccctcaaatgcgcgtgtgcacgtgtgcgtgtgcgtgcgtgtgtgtgtgtttgtgagcatgggtgtgcccttggggtaagccagagcctggggtgttctctttggtgttacacagcccaagaggactgagactggcacttagcccaagaggtctgagccctggtgtgtttccagatcgatcctggattcactcactcactcattccttcactcatccagccacctaaaaacatttactgaccatgtactacgtgccagctctagttttcagccttgggaggttttattctgacttcctctgattttggcatgtggagacactcctataaggagagttcaagcctgtgggagtagaaaaatctcattcccagagtcagaggagaagagacatgtaccttgaccatcgtccttcctctcaagctagccagagggtgggagcctaaggaagcgtggggtagcagatggagtaatggtcacgaggtccagacccactcccaaagctcagacttgccaggctccctttctcttcttccccaggtccttcctttaggtctggttgttgcaccatctgcttggttggctggcagctgagagccctgctgtgggagagcgaagggggtcaaaggaagacttgaagcacagagggctagggaggtggggtacatttctctgagcagtcagggtgggaagaaagaatgcaagagtggactgaatgtgcctaatggagaagacccacgtgctaggggatgaggggcttcctgggtcctgttccctaccccatttgtggtcacagccatgaagtcaccgggatgaacctatccttccagtggctcgctccctgtagctctgcctccctctccatatctccttcccctacacctccctccccacacctccctactcccctgggcatcttctggcttgactggatggaaggagacttaggaacctaccagttggccatgatgtcttttcttctttttcttttttttaacaaaacagaacaaaaccaaaaaatgtccagatgaaaaaaaaaaa

SEQ ID NO: 102 - protein, 258 aa, Homo sapiens
MLPLCLVAALLLAAGPGPSLGDEAIHCPPCSEEKLARCRPPVGCEELVREPGCGCCATCALGLGMPCGVYTPRCGSGLRCYPPRGVEKPLHTLMHGQGVCMELAEIEAIQESLQPSDKDEGDHPNNSFSPCSAHDRRCLQKHFAKIRDRSTSGGKMKVNGAPREDARPVPQGSCQSELHRALERLAASQSRTHEDLYIIPIPNCDRNGNFHPKQCHPALDGQRGKCWCVDRKTGVKLPGGLEPKGELDCHQLADSFRE

SEQ ID NO: 103 - DNA, 7321 bp, Homo sapiens
ttttgtagataaatgtgaggattttctctaaatccctcttctgtttgctaaatctcactgtcactgctaaattcagagcagatagagcctgcgcaatggaataaagtcctcaaaattgaaatgtgacattgctctcaacatctcccatctctctggatttctttttgcttcattattcctgctaaccaattcattttcagactttgtacttcagaagcaatgggaaaaatcagcagtcttccaacccaattatttaagtgctgcttttgtgatttcttgaaggtgaagatgcacaccatgtcctcctcgcatctcttctacctggcgctgtgcctgctcaccttcaccagctctgccacggctggaccggagacgctctgcggggctgagctggtggatgctcttcagttcgtgtgtggagacaggggcttttatttcaacaagcccacagggtatggctccagcagtcggagggcgcctcagacaggcatcgtggatgagtgctgcttccggagctgtgatctaaggaggctggagatgtattgcgcacccctcaagcctgccaagtcagctcgctctgtccgtgcccagcgccacaccgacatgcccaagacccagaaggaagtacatttgaagaacgcaagtagagggagtgcaggaaacaagaactacaggatgtaggaagaccctcctgaggagtgaagagtgacatgccaccgcaggatcctttgctctgcacgagttacctgttaaactttggaacacctaccaaaaaataagtttgataacatttaaaagatgggcgtttcccccaatgaaatacacaagtaaacattccaacattgtctttaggagtgatttgcaccttgcaaaaatggtcctggagttggtagattgctgttgatcttttatcaataatgttctatagaaaagaaaaaaaaaatatatatatatatatatcttagtccctgcctctcaagagccacaaatgcatgggtgttgtatagatccagttgcactaaattcctctctgaatcttggctgctggagccattcattcagcaaccttgtctaagtggtttatgaattgtttccttatttgcacttctttctacacaactcgggctgtttgttttacagtgtctgataatcttgttagtctatacccaccacctcccttcataacctttatatttgccgaatttggcctcctcaaaagcagcagcaagtcgtcaagaagcacaccaattctaacccacaagattccatctgtggcatttgtaccaaatataagttggatgcattttattttagacacaaagctttatttttccacatcatgcttacaaaaaagaataatgcaaatagttgcaactttgaggccaatcatttttaggcatatgttttaaacatagaaagtttcttcaactcaaaagagttccttcaaatgatgagttaatgtgcaacctaattagtaactttcctctttttattttttccatatagagcactatgtaaatttagcatatcaattatacaggatatatcaaacagtatgtaaaactctgttttttagtataatggtgctattttgtagtttgttatatgaaagagtctggccaaaacggtaatacgtgaaagcaaaacaataggggaagcctggagccaaagatgacacaaggggaagggtactgaaaacaccatccatttgggaaagaaggcaaagtccccccagttatgccttccaagaggaacttcagacacaaaagtccactgatgcaaattggactggcgagtccagagaggaaactgtggaatggaaaaagcagaaggctaggaattttagcagtcctggtttctttttctcatggaagaaatgaacatctgccagctgtgtcatggactcaccactgtgtgaccttgggcaagtcacttcacctctctgtgcctcagtttcctcatctgcaaaatgggggcaatatgtcatctacctacctcaaaggggtggtataaggtttaaaaagataaagattcagattttttttaccctgggttgctgtaagggtgcaacatcagggcgcttgagttgctgagatgcaaggaattctataaataacccattcatagcatagctagagattggtgaattgaatgctcctgacatctcagttcttgtcagtgaagctatccaaataactggccaactagttgttaaaagctaacagctcaatctcttaaaacacttttcaaaatatgtgggaagcatttgattttcaatttgattttgaattctgcatttggttttatgaatacaaagataagtgaaaagagagaaaggaaaagaaaaaggagaaaaacaaagagatttctaccagtgaaaggggaattaattactctttgttagcactcactgactcttctatgcagttactacatatctagtaaaacctcgtttaatactataaataatattctattcattttgaaaaacacaatgattccttcttttctaggcaatataaggaaagtgatccaaaatttgaaatattaaaataatatctaataaaaagtcacaaagttatcttctttaacaaactttactcttattcttagctgtatatacatttttttaaaagtttgttaaaatatgcttgactagagtttccagttgaaaggcaaaaacttccatcacaacaagaaatttcccatgcctgctcagaagggtagcccctagctctctgtgaatgtgttttatccattcaactgaaaattggtatcaagaaagtccactggttagtgtactagtccatcatagcctagaaaatgatccctatctgcagatcaagattttctcattagaacaatgaattatccagcattcagatctttctagtcaccttagaactttttggttaaaagtacccaggcttgattatttcatgcaaattctatattttacattcttggaaagtctatatgaaaaacaaaaataacatcttcagtttttctcccactgggtcacctcaaggatcagaggccaggaaaaaaaaaaaaaagactccctggatctctgaatatatgcaaaaagaaggccccatttagtggagccagcaatcctgttcagtcaacaagtattttaactctcagtccaacattatttgaattgagcacctcaagcatgcttagcaatgttctaatcactatggacagatgtaaaagaaactatacatcatttttgccctctgcctgttttccagacatacaggttctgtggaataagatactggactcctcttcccaagatggcacttctttttatttcttgtccccagtgtgtaccttttaaaattattccctctcaacaaaactttataggcagtcttctgcagacttaacgtgttttctgtcatagttagatgtgataattctaagagtgtctatgacttatttccttcacttaattctatccacagtcaaaaatcccccaaggaggaaagctgaaagatgcactgccatattatctttcttaactttttccaacacataatcctctccaactggattataaataaattgaaaataactcattataccaattcactattttattttttaatgaattaaaactagaaaacaaattgatgcaaaccctggaagtcagttgattactatatactacagcagaatgactcagatttcatagaaaggagcaaccaaaatgtcacaacccaaaactttacaagctttgcttcagaattagattgctttataattcttgaatgaggcaatttcaagatatttgtaaaagaacagtaaacattggtaagaatgagctttcaactcataggcttatttccaatttaattgaccatactggatacttaggtcaaatttctgttctctcttccccaaataatattaaagtattatttgaactttttaagatgaggcagttcccctgaaaaagttaatgcagctctccatcagaatccactcttctagggatatgaaaatctcttaacacccaccctacatacacagacacacacacacacacacacacacacacacacacacacattcaccctaaggatccaatggaatactgaaaagaaatcacttccttgaaaattttattaaaaaacaaacaaacaaacaaaaagcctgtccacccttgagaatccttcctctccttggaacgtcaatgtttgtgtagatgaaaccatctcatgctctgtggctccagggtttctgttactattttatgcacttgggagaaggcttagaataaaagatgtagcacattttgctttcccatttattgtttggccagctatgccaatgtggtgctattgtttctttaagaaagtacttgactaaaaaaaaaagaaaaaaagaaaaaaaagaaagcatagacatatttttttaaagtataaaaacaacaattctatagatagatggcttaataaaatagcattaggtctatctagccaccaccacctttcaactttttatcactcacaagtagtgtactgttcaccaaattgtgaatttgggggtgcaggggcaggagttggaaattttttaaagttagaaggctccattgttttgttggctctcaaacttagcaaaattagcaatatattatccaatcttctgaacttgatcaagagcatggagaataaacgcgggaaaaaagatcttataggcaaatagaagaatttaaaagataagtaagttccttattgatttttgtgcactctgctctaaaacagatattcagcaagtggagaaaataagaacaaagagaaaaaatacatagatttacctgcaaaaaatagcttctgccaaatcccccttgggtattctttggcatttactggtttatagaagacattctcccttcacccagacatctcaaagagcagtagctctcatgaaaagcaatcactgatctcatttgggaaatgttggaaagtatttccttatgagatgggggttatctactgataaagaaagaatttatgagaaattgttgaaagagatggctaacaatctgtgaagattttttgtttcttgtttttgttttttttttttttttactttatacagtctttatgaatttcttaatgttcaaaatgacttggttcttttcttctttttttatatcagaatgaggaataataagttaaacccacatagactctttaaaactataggctagatagaaatgtatgtttgacttgttgaagctataatcagactatttaaaatgttttgctatttttaatcttaaaagattgtgctaatttattagagcagaacctgtttggctctcctcagaagaaagaatctttccattcaaatcacatggctttccaccaatattttcaaaagataaatctgatttatgcaatggcatcatttattttaaaacagaagaattgtgaaagtttatgcccctcccttgcaaagaccataaagtccagatctggtaggggggcaacaacaaaaggaaaatgttgttgattcttggttttggattttgttttgttttcaatgctagtgtttaatcctgtagtacatatttgcttattgctattttaatattttataagaccttcctgttaggtattagaaagtgatacatagatatcttttttgtgtaatttctatttaaaaaagagagaagactgtcagaagctttaagtgcatatggtacaggataaagatatcaatttaaataaccaattcctatctggaacaatgcttttgttttttaaagaaacctctcacagataagacagaggcccaggggatttttgaagctgtctttattctgcccccatcccaacccagcccttattattttagtatctgcctcagaattttatagagggctgaccaagctgaaactctagaattaaaggaacctcactgaaaacatatatttcacgtgttccctctttttttttttcctttttgtgagatggggtctcgcactgtcccccaggctggagtgcagtggcatgatctcggctcactgcaacctccacctcctgggtttaagcgattctcctgcctcagcctcctgagtagctgggattacaggcacccaccactatgcccggctaattttttggatttttaatagagacggggttttaccatgttggccaggttggtctcaaactcctgaccttgtgatttgcccgcctcagcctcccaaattgctgggattacaggcatgagccaccacaccctgcccatgtgttccctcttaatgtatgattacatggatcttaaacatgatccttctctcctcattcttcaactatctttgatggggtctttcaaggggaaaaaaatccaagcttttttaaagtaaaaaaaaaaaaagagaggacacaaaaccaaatgttactgctcaactgaaatatgagttaagatggagacagagtttctcctaataaccggagctgaattacctttcactttcaaaaacatgaccttccacaatccttagaatctgcctttttttatattactgaggcctaaaagtaaacattactcattttattttgcccaaaatgcactgatgtaaagtaggaaaaataaaaacagagctctaaaatccctttcaagccacccattgaccccactcaccaactcatagcaaagtcacttctgttaatcccttaatctgattttgtttggatatttatcttgtacccgctgctaaacacactgcaggagggactctgaaacctcaagctgtctacttacatcttttatctgtgtctgtgtatcatgaaaatgtctattcaaaatatcaaaacctttcaaatatcacgcagcttatattcagtttacataaaggccccaaataccatgtcagatctttttggtaaaagagttaatgaactatgagaattgggattacatcatgtattttgcctcatgtatttttatcacacttataggccaagtgtgataaataaacttacagacactgaattaatttcccctgctactttgaaaccagaaaataatgactggccattcgttacatctgtcttagttgaaaagcatattttttattaaattaattctgattgtatttgaaattattattcaattcacttatggcagaggaatatcaatcctaatgacttctaaaaatgtaactaattgaatcattatcttacatttactgtttaataagcatattttgaaaatgtatggctagagtgtcataataaaatggtatatctttctttagtaattacattaaaattagtcatgtttgattaattagttc

SEQ ID NO: 104 - protein, 153 aa, Homo sapiens
MGKISSLPTQLFKCCFCDFLKVKMHTMSSSHLFYLALCLLTFTSSATAGPETLCGAELVDALQFVCGDRGFYFNKPTGYGSSSRRAPQTGIVDECCFRSCDLRRLEMYCAPLKPAKSARSVRAQRHTDMPKTQKEVHLKNASRGSAGNKNYRM

SEQ ID NO: 105 - DNA, 7370 bp, Homo sapiens
ttttgtagataaatgtgaggattttctctaaatccctcttctgtttgctaaatctcactgtcactgctaaattcagagcagatagagcctgcgcaatggaataaagtcctcaaaattgaaatgtgacattgctctcaacatctcccatctctctggatttctttttgcttcattattcctgctaaccaattcattttcagactttgtacttcagaagcaatgggaaaaatcagcagtcttccaacccaattatttaagtgctgcttttgtgatttcttgaaggtgaagatgcacaccatgtcctcctcgcatctcttctacctggcgctgtgcctgctcaccttcaccagctctgccacggctggaccggagacgctctgcggggctgagctggtggatgctcttcagttcgtgtgtggagacaggggcttttatttcaacaagcccacagggtatggctccagcagtcggagggcgcctcagacaggcatcgtggatgagtgctgcttccggagctgtgatctaaggaggctggagatgtattgcgcacccctcaagcctgccaagtcagctcgctctgtccgtgcccagcgccacaccgacatgcccaagacccagaagtatcagcccccatctaccaacaagaacacgaagtctcagagaaggaaaggaagtacatttgaagaacgcaagtagagggagtgcaggaaacaagaactacaggatgtaggaagaccctcctgaggagtgaagagtgacatgccaccgcaggatcctttgctctgcacgagttacctgttaaactttggaacacctaccaaaaaataagtttgataacatttaaaagatgggcgtttcccccaatgaaatacacaagtaaacattccaacattgtctttaggagtgatttgcaccttgcaaaaatggtcctggagttggtagattgctgttgatcttttatcaataatgttctatagaaaagaaaaaaaaaatatatatatatatatatcttagtccctgcctctcaagagccacaaatgcatgggtgttgtatagatccagttgcactaaattcctctctgaatcttggctgctggagccattcattcagcaaccttgtctaagtggtttatgaattgtttccttatttgcacttctttctacacaactcgggctgtttgttttacagtgtctgataatcttgttagtctatacccaccacctcccttcataacctttatatttgccgaatttggcctcctcaaaagcagcagcaagtcgtcaagaagcacaccaattctaacccacaagattccatctgtggcatttgtaccaaatataagttggatgcattttattttagacacaaagctttatttttccacatcatgcttacaaaaaagaataatgcaaatagttgcaactttgaggccaatcatttttaggcatatgttttaaacatagaaagtttcttcaactcaaaagagttccttcaaatgatgagttaatgtgcaacctaattagtaactttcctctttttattttttccatatagagcactatgtaaatttagcatatcaattatacaggatatatcaaacagtatgtaaaactctgttttttagtataatggtgctattttgtagtttgttatatgaaagagtctggccaaaacggtaatacgtgaaagcaaaacaataggggaagcctggagccaaagatgacacaaggggaagggtactgaaaacaccatccatttgggaaagaaggcaaagtccccccagttatgccttccaagaggaacttcagacacaaaagtccactgatgcaaattggactggcgagtccagagaggaaactgtggaatggaaaaagcagaaggctaggaattttagcagtcctggtttctttttctcatggaagaaatgaacatctgccagctgtgtcatggactcaccactgtgtgaccttgggcaagtcacttcacctctctgtgcctcagtttcctcatctgcaaaatgggggcaatatgtcatctacctacctcaaaggggtggtataaggtttaaaaagataaagattcagattttttttaccctgggttgctgtaagggtgcaacatcagggcgcttgagttgctgagatgcaaggaattctataaataacccattcatagcatagctagagattggtgaattgaatgctcctgacatctcagttcttgtcagtgaagctatccaaataactggccaactagttgttaaaagctaacagctcaatctcttaaaacacttttcaaaatatgtgggaagcatttgattttcaatttgattttgaattctgcatttggttttatgaatacaaagataagtgaaaagagagaaaggaaaagaaaaaggagaaaaacaaagagatttctaccagtgaaaggggaattaattactctttgttagcactcactgactcttctatgcagttactacatatctagtaaaacctcgtttaatactataaataatattctattcattttgaaaaacacaatgattccttcttttctaggcaatataaggaaagtgatccaaaatttgaaatattaaaataatatctaataaaaagtcacaaagttatcttctttaacaaactttactcttattcttagctgtatatacatttttttaaaagtttgttaaaatatgcttgactagagtttccagttgaaaggcaaaaacttccatcacaacaagaaatttcccatgcctgctcagaagggtagcccctagctctctgtgaatgtgttttatccattcaactgaaaattggtatcaagaaagtccactggttagtgtactagtccatcatagcctagaaaatgatccctatctgcagatcaagattttctcattagaacaatgaattatccagcattcagatctttctagtcaccttagaactttttggttaaaagtacccaggcttgattatttcatgcaaattctatattttacattcttggaaagtctatatgaaaaacaaaaataacatcttcagtttttctcccactgggtcacctcaaggatcagaggccaggaaaaaaaaaaaaaagactccctggatctctgaatatatgcaaaaagaaggccccatttagtggagccagcaatcctgttcagtcaacaagtattttaactctcagtccaacattatttgaattgagcacctcaagcatgcttagcaatgttctaatcactatggacagatgtaaaagaaactatacatcatttttgccctctgcctgttttccagacatacaggttctgtggaataagatactggactcctcttcccaagatggcacttctttttatttcttgtccccagtgtgtaccttttaaaattattccctctcaacaaaactttataggcagtcttctgcagacttaacgtgttttctgtcatagttagatgtgataattctaagagtgtctatgacttatttccttcacttaattctatccacagtcaaaaatcccccaaggaggaaagctgaaagatgcactgccatattatctttcttaactttttccaacacataatcctctccaactggattataaataaattgaaaataactcattataccaattcactattttattttttaatgaattaaaactagaaaacaaattgatgcaaaccctggaagtcagttgattactatatactacagcagaatgactcagatttcatagaaaggagcaaccaaaatgtcacaacccaaaactttacaagctttgcttcagaattagattgctttataattcttgaatgaggcaatttcaagatatttgtaaaagaacagtaaacattggtaagaatgagctttcaactcataggcttatttccaatttaattgaccatactggatacttaggtcaaatttctgttctctcttccccaaataatattaaagtattatttgaactttttaagatgaggcagttcccctgaaaaagttaatgcagctctccatcagaatccactcttctagggatatgaaaatctcttaacacccaccctacatacacagacacacacacacacacacacacacacacacacacacacattcaccctaaggatccaatggaatactgaaaagaaatcacttccttgaaaattttattaaaaaacaaacaaacaaacaaaaagcctgtccacccttgagaatccttcctctccttggaacgtcaatgtttgtgtagatgaaaccatctcatgctctgtggctccagggtttctgttactattttatgcacttgggagaaggcttagaataaaagatgtagcacattttgctttcccatttattgtttggccagctatgccaatgtggtgctattgtttctttaagaaagtacttgactaaaaaaaaaagaaaaaaagaaaaaaaagaaagcatagacatatttttttaaagtataaaaacaacaattctatagatagatggcttaataaaatagcattaggtctatctagccaccaccacctttcaactttttatcactcacaagtagtgtactgttcaccaaattgtgaatttgggggtgcaggggcaggagttggaaattttttaaagttagaaggctccattgttttgttggctctcaaacttagcaaaattagcaatatattatccaatcttctgaacttgatcaagagcatggagaataaacgcgggaaaaaagatcttataggcaaatagaagaatttaaaagataagtaagttccttattgatttttgtgcactctgctctaaaacagatattcagcaagtggagaaaataagaacaaagagaaaaaatacatagatttacctgcaaaaaatagcttctgccaaatcccccttgggtattctttggcatttactggtttatagaagacattctcccttcacccagacatctcaaagagcagtagctctcatgaaaagcaatcactgatctcatttgggaaatgttggaaagtatttccttatgagatgggggttatctactgataaagaaagaatttatgagaaattgttgaaagagatggctaacaatctgtgaagattttttgtttcttgtttttgttttttttttttttttactttatacagtctttatgaatttcttaatgttcaaaatgacttggttcttttcttctttttttatatcagaatgaggaataataagttaaacccacatagactctttaaaactataggctagatagaaatgtatgtttgacttgttgaagctataatcagactatttaaaatgttttgctatttttaatcttaaaagattgtgctaatttattagagcagaacctgtttggctctcctcagaagaaagaatctttccattcaaatcacatggctttccaccaatattttcaaaagataaatctgatttatgcaatggcatcatttattttaaaacagaagaattgtgaaagtttatgcccctcccttgcaaagaccataaagtccagatctggtaggggggcaacaacaaaaggaaaatgttgttgattcttggttttggattttgttttgttttcaatgctagtgtttaatcctgtagtacatatttgcttattgctattttaatattttataagaccttcctgttaggtattagaaagtgatacatagatatcttttttgtgtaatttctatttaaaaaagagagaagactgtcagaagctttaagtgcatatggtacaggataaagatatcaatttaaataaccaattcctatctggaacaatgcttttgttttttaaagaaacctctcacagataagacagaggcccaggggatttttgaagctgtctttattctgcccccatcccaacccagcccttattattttagtatctgcctcagaattttatagagggctgaccaagctgaaactctagaattaaaggaacctcactgaaaacatatatttcacgtgttccctctttttttttttcctttttgtgagatggggtctcgcactgtcccccaggctggagtgcagtggcatgatctcggctcactgcaacctccacctcctgggtttaagcgattctcctgcctcagcctcctgagtagctgggattacaggcacccaccactatgcccggctaattttttggatttttaatagagacggggttttaccatgttggccaggttggtctcaaactcctgaccttgtgatttgcccgcctcagcctcccaaattgctgggattacaggcatgagccaccacaccctgcccatgtgttccctcttaatgtatgattacatggatcttaaacatgatccttctctcctcattcttcaactatctttgatggggtctttcaaggggaaaaaaatccaagcttttttaaagtaaaaaaaaaaaaagagaggacacaaaaccaaatgttactgctcaactgaaatatgagttaagatggagacagagtttctcctaataaccggagctgaattacctttcactttcaaaaacatgaccttccacaatccttagaatctgcctttttttatattactgaggcctaaaagtaaacattactcattttattttgcccaaaatgcactgatgtaaagtaggaaaaataaaaacagagctctaaaatccctttcaagccacccattgaccccactcaccaactcatagcaaagtcacttctgttaatcccttaatctgattttgtttggatatttatcttgtacccgctgctaaacacactgcaggagggactctgaaacctcaagctgtctacttacatcttttatctgtgtctgtgtatcatgaaaatgtctattcaaaatatcaaaacctttcaaatatcacgcagcttatattcagtttacataaaggccccaaataccatgtcagatctttttggtaaaagagttaatgaactatgagaattgggattacatcatgtattttgcctcatgtatttttatcacacttataggccaagtgtgataaataaacttacagacactgaattaatttcccctgctactttgaaaccagaaaataatgactggccattcgttacatctgtcttagttgaaaagcatattttttattaaattaattctgattgtatttgaaattattattcaattcacttatggcagaggaatatcaatcctaatgacttctaaaaatgtaactaattgaatcattatcttacatttactgtttaataagcatattttgaaaatgtatggctagagtgtcataataaaatggtatatctttctttagtaattacattaaaattagtcatgtttgattaattagttc

SEQ ID NO: 106 - protein, 158 aa, Homo sapiens
MGKISSLPTQLFKCCFCDFLKVKMHTMSSSHLFYLALCLLTFTSSATAGPETLCGAELVDALQFVCGDRGFYFNKPTGYGSSSRRAPQTGIVDECCFRSCDLRRLEMYCAPLKPAKSARSVRAQRHTDMPKTQKYQPPSTNKNTKSQRRKGSTFEERK

SEQ ID NO: 107 - DNA, 7204 bp, Homo sapiens
gcatacctgcctgggtgtccaaatgtaactagatgctttcacaaaccccacccacaaagcagcacatgtttttaagacttcagttttctattcacatcggcctcataatacccaccctgacctgctgtaaaagacctggaacaaacaaaaatgattacacctacagtgaagatgcacaccatgtcctcctcgcatctcttctacctggcgctgtgcctgctcaccttcaccagctctgccacggctggaccggagacgctctgcggggctgagctggtggatgctcttcagttcgtgtgtggagacaggggcttttatttcaacaagcccacagggtatggctccagcagtcggagggcgcctcagacaggcatcgtggatgagtgctgcttccggagctgtgatctaaggaggctggagatgtattgcgcacccctcaagcctgccaagtcagctcgctctgtccgtgcccagcgccacaccgacatgcccaagacccagaaggaagtacatttgaagaacgcaagtagagggagtgcaggaaacaagaactacaggatgtaggaagaccctcctgaggagtgaagagtgacatgccaccgcaggatcctttgctctgcacgagttacctgttaaactttggaacacctaccaaaaaataagtttgataacatttaaaagatgggcgtttcccccaatgaaatacacaagtaaacattccaacattgtctttaggagtgatttgcaccttgcaaaaatggtcctggagttggtagattgctgttgatcttttatcaataatgttctatagaaaagaaaaaaaaaatatatatatatatatatcttagtccctgcctctcaagagccacaaatgcatgggtgttgtatagatccagttgcactaaattcctctctgaatcttggctgctggagccattcattcagcaaccttgtctaagtggtttatgaattgtttccttatttgcacttctttctacacaactcgggctgtttgttttacagtgtctgataatcttgttagtctatacccaccacctcccttcataacctttatatttgccgaatttggcctcctcaaaagcagcagcaagtcgtcaagaagcacaccaattctaacccacaagattccatctgtggcatttgtaccaaatataagttggatgcattttattttagacacaaagctttatttttccacatcatgcttacaaaaaagaataatgcaaatagttgcaactttgaggccaatcatttttaggcatatgttttaaacatagaaagtttcttcaactcaaaagagttccttcaaatgatgagttaatgtgcaacctaattagtaactttcctctttttattttttccatatagagcactatgtaaatttagcatatcaattatacaggatatatcaaacagtatgtaaaactctgttttttagtataatggtgctattttgtagtttgttatatgaaagagtctggccaaaacggtaatacgtgaaagcaaaacaataggggaagcctggagccaaagatgacacaaggggaagggtactgaaaacaccatccatttgggaaagaaggcaaagtccccccagttatgccttccaagaggaacttcagacacaaaagtccactgatgcaaattggactggcgagtccagagaggaaactgtggaatggaaaaagcagaaggctaggaattttagcagtcctggtttctttttctcatggaagaaatgaacatctgccagctgtgtcatggactcaccactgtgtgaccttgggcaagtcacttcacctctctgtgcctcagtttcctcatctgcaaaatgggggcaatatgtcatctacctacctcaaaggggtggtataaggtttaaaaagataaagattcagattttttttaccctgggttgctgtaagggtgcaacatcagggcgcttgagttgctgagatgcaaggaattctataaataacccattcatagcatagctagagattggtgaattgaatgctcctgacatctcagttcttgtcagtgaagctatccaaataactggccaactagttgttaaaagctaacagctcaatctcttaaaacacttttcaaaatatgtgggaagcatttgattttcaatttgattttgaattctgcatttggttttatgaatacaaagataagtgaaaagagagaaaggaaaagaaaaaggagaaaaacaaagagatttctaccagtgaaaggggaattaattactctttgttagcactcactgactcttctatgcagttactacatatctagtaaaacctcgtttaatactataaataatattctattcattttgaaaaacacaatgattccttcttttctaggcaatataaggaaagtgatccaaaatttgaaatattaaaataatatctaataaaaagtcacaaagttatcttctttaacaaactttactcttattcttagctgtatatacatttttttaaaagtttgttaaaatatgcttgactagagtttccagttgaaaggcaaaaacttccatcacaacaagaaatttcccatgcctgctcagaagggtagcccctagctctctgtgaatgtgttttatccattcaactgaaaattggtatcaagaaagtccactggttagtgtactagtccatcatagcctagaaaatgatccctatctgcagatcaagattttctcattagaacaatgaattatccagcattcagatctttctagtcaccttagaactttttggttaaaagtacccaggcttgattatttcatgcaaattctatattttacattcttggaaagtctatatgaaaaacaaaaataacatcttcagtttttctcccactgggtcacctcaaggatcagaggccaggaaaaaaaaaaaaaagactccctggatctctgaatatatgcaaaaagaaggccccatttagtggagccagcaatcctgttcagtcaacaagtattttaactctcagtccaacattatttgaattgagcacctcaagcatgcttagcaatgttctaatcactatggacagatgtaaaagaaactatacatcatttttgccctctgcctgttttccagacatacaggttctgtggaataagatactggactcctcttcccaagatggcacttctttttatttcttgtccccagtgtgtaccttttaaaattattccctctcaacaaaactttataggcagtcttctgcagacttaacgtgttttctgtcatagttagatgtgataattctaagagtgtctatgacttatttccttcacttaattctatccacagtcaaaaatcccccaaggaggaaagctgaaagatgcactgccatattatctttcttaactttttccaacacataatcctctccaactggattataaataaattgaaaataactcattataccaattcactattttattttttaatgaattaaaactagaaaacaaattgatgcaaaccctggaagtcagttgattactatatactacagcagaatgactcagatttcatagaaaggagcaaccaaaatgtcacaacccaaaactttacaagctttgcttcagaattagattgctttataattcttgaatgaggcaatttcaagatatttgtaaaagaacagtaaacattggtaagaatgagctttcaactcataggcttatttccaatttaattgaccatactggatacttaggtcaaatttctgttctctcttccccaaataatattaaagtattatttgaactttttaagatgaggcagttcccctgaaaaagttaatgcagctctccatcagaatccactcttctagggatatgaaaatctcttaacacccaccctacatacacagacacacacacacacacacacacacacacacacacacacattcaccctaaggatccaatggaatactgaaaagaaatcacttccttgaaaattttattaaaaaacaaacaaacaaacaaaaagcctgtccacccttgagaatccttcctctccttggaacgtcaatgtttgtgtagatgaaaccatctcatgctctgtggctccagggtttctgttactattttatgcacttgggagaaggcttagaataaaagatgtagcacattttgctttcccatttattgtttggccagctatgccaatgtggtgctattgtttctttaagaaagtacttgactaaaaaaaaaagaaaaaaagaaaaaaaagaaagcatagacatatttttttaaagtataaaaacaacaattctatagatagatggcttaataaaatagcattaggtctatctagccaccaccacctttcaactttttatcactcacaagtagtgtactgttcaccaaattgtgaatttgggggtgcaggggcaggagttggaaattttttaaagttagaaggctccattgttttgttggctctcaaacttagcaaaattagcaatatattatccaatcttctgaacttgatcaagagcatggagaataaacgcgggaaaaaagatcttataggcaaatagaagaatttaaaagataagtaagttccttattgatttttgtgcactctgctctaaaacagatattcagcaagtggagaaaataagaacaaagagaaaaaatacatagatttacctgcaaaaaatagcttctgccaaatcccccttgggtattctttggcatttactggtttatagaagacattctcccttcacccagacatctcaaagagcagtagctctcatgaaaagcaatcactgatctcatttgggaaatgttggaaagtatttccttatgagatgggggttatctactgataaagaaagaatttatgagaaattgttgaaagagatggctaacaatctgtgaagattttttgtttcttgtttttgttttttttttttttttactttatacagtctttatgaatttcttaatgttcaaaatgacttggttcttttcttctttttttatatcagaatgaggaataataagttaaacccacatagactctttaaaactataggctagatagaaatgtatgtttgacttgttgaagctataatcagactatttaaaatgttttgctatttttaatcttaaaagattgtgctaatttattagagcagaacctgtttggctctcctcagaagaaagaatctttccattcaaatcacatggctttccaccaatattttcaaaagataaatctgatttatgcaatggcatcatttattttaaaacagaagaattgtgaaagtttatgcccctcccttgcaaagaccataaagtccagatctggtaggggggcaacaacaaaaggaaaatgttgttgattcttggttttggattttgttttgttttcaatgctagtgtttaatcctgtagtacatatttgcttattgctattttaatattttataagaccttcctgttaggtattagaaagtgatacatagatatcttttttgtgtaatttctatttaaaaaagagagaagactgtcagaagctttaagtgcatatggtacaggataaagatatcaatttaaataaccaattcctatctggaacaatgcttttgttttttaaagaaacctctcacagataagacagaggcccaggggatttttgaagctgtctttattctgcccccatcccaacccagcccttattattttagtatctgcctcagaattttatagagggctgaccaagctgaaactctagaattaaaggaacctcactgaaaacatatatttcacgtgttccctctttttttttttcctttttgtgagatggggtctcgcactgtcccccaggctggagtgcagtggcatgatctcggctcactgcaacctccacctcctgggtttaagcgattctcctgcctcagcctcctgagtagctgggattacaggcacccaccactatgcccggctaattttttggatttttaatagagacggggttttaccatgttggccaggttggtctcaaactcctgaccttgtgatttgcccgcctcagcctcccaaattgctgggattacaggcatgagccaccacaccctgcccatgtgttccctcttaatgtatgattacatggatcttaaacatgatccttctctcctcattcttcaactatctttgatggggtctttcaaggggaaaaaaatccaagcttttttaaagtaaaaaaaaaaaaagagaggacacaaaaccaaatgttactgctcaactgaaatatgagttaagatggagacagagtttctcctaataaccggagctgaattacctttcactttcaaaaacatgaccttccacaatccttagaatctgcctttttttatattactgaggcctaaaagtaaacattactcattttattttgcccaaaatgcactgatgtaaagtaggaaaaataaaaacagagctctaaaatccctttcaagccacccattgaccccactcaccaactcatagcaaagtcacttctgttaatcccttaatctgattttgtttggatatttatcttgtacccgctgctaaacacactgcaggagggactctgaaacctcaagctgtctacttacatcttttatctgtgtctgtgtatcatgaaaatgtctattcaaaatatcaaaacctttcaaatatcacgcagcttatattcagtttacataaaggccccaaataccatgtcagatctttttggtaaaagagttaatgaactatgagaattgggattacatcatgtattttgcctcatgtatttttatcacacttataggccaagtgtgataaataaacttacagacactgaattaatttcccctgctactttgaaaccagaaaataatgactggccattcgttacatctgtcttagttgaaaagcatattttttattaaattaattctgattgtatttgaaattattattcaattcacttatggcagaggaatatcaatcctaatgacttctaaaaatgtaactaattgaatcattatcttacatttactgtttaataagcatattttgaaaatgtatggctagagtgtcataataaaatggtatatctttctttagtaattacattaaaattagtcatgtttgattaattagttc

SEQ ID NO: 108 - protein, 137 aa, Homo sapiens
MITPTVKMHTMSSSHLFYLALCLLTFTSSATAGPETLCGAELVDALQFVCGDRGFYFNKPTGYGSSSRRAPQTGIVDECCFRSCDLRRLEMYCAPLKPAKSARSVRAQRHTDMPKTQKEVHLKNASRGSAGNKNYRM

SEQ ID NO: 109 - DNA, 949 bp, Homo sapiens
ttttgtagataaatgtgaggattttctctaaatccctcttctgtttgctaaatctcactgtcactgctaaattcagagcagatagagcctgcgcaatggaataaagtcctcaaaattgaaatgtgacattgctctcaacatctcccatctctctggatttctttttgcttcattattcctgctaaccaattcattttcagactttgtacttcagaagcaatgggaaaaatcagcagtcttccaacccaattatttaagtgctgcttttgtgatttcttgaaggtgaagatgcacaccatgtcctcctcgcatctcttctacctggcgctgtgcctgctcaccttcaccagctctgccacggctggaccggagacgctctgcggggctgagctggtggatgctcttcagttcgtgtgtggagacaggggcttttatttcaacaagcccacagggtatggctccagcagtcggagggcgcctcagacaggcatcgtggatgagtgctgcttccggagctgtgatctaaggaggctggagatgtattgcgcacccctcaagcctgccaagtcagctcgctctgtccgtgcccagcgccacaccgacatgcccaagacccagaagtatcagcccccatctaccaacaagaacacgaagtctcagagaaggaaaggttggccaaagacacatccaggaggggaacagaaggaggggacagaagcaagtctgcagatcagaggaaagaagaaagagcagaggagggagattggaagtagaaatgctgaatgcagaggcaaaaaaggaaaatgaaggacaggaggattaaacagacagaggcaaggatgatgagagaggagcagacagcaagaatgaaaagcagaaaatacaatagaggaaatgaagaaaagtaggcctgctggagctagatgatgatgtgatggaaatagaagta

SEQ ID NO: 110 - protein, 195 aa, Homo sapiens
MGKISSLPTQLFKCCFCDFLKVKMHTMSSSHLFYLALCLLTFTSSATAGPETLCGAELVDALQFVCGDRGFYFNKPTGYGSSSRRAPQTGIVDECCFRSCDLRRLEMYCAPLKPAKSARSVRAQRHTDMPKTQKYQPPSTNKNTKSQRRKGWPKTHPGGEQKEGTEASLQIRGKKKEQRREIGSRNAECRGKKGK

SEQ ID NO: 111 - DNA, 8743 bp, Homo sapiens
ggttgtttttcggagcctccctctgctcagcgttggtggtggcggtggcagcatggcgagccctccggagagcgatggcttctcggacgtgcgcaaggtgggctacctgcgcaaacccaagagcatgcacaaacgcttcttcgtactgcgcgcggccagcgaggctgggggcccggcgcgcctcgagtactacgagaacgagaagaagtggcggcacaagtcgagcgcccccaaacgctcgatcccccttgagagctgcttcaacatcaacaagcgggctgactccaagaacaagcacctggtggctctctacacccgggacgagcactttgccatcgcggcggacagcgaggccgagcaagacagctggtaccaggctctcctacagctgcacaaccgtgctaagggccaccacgacggagctgcggccctcggggcgggaggtggtgggggcagctgcagcggcagctccggccttggtgaggctggggaggacttgagctacggtgacgtgcccccaggacccgcattcaaagaggtctggcaagtgatcctgaagcccaagggcctgggtcagacaaagaacctgattggtatctaccgcctttgcctgaccagcaagaccatcagcttcgtgaagctgaactcggaggcagcggccgtggtgctgcagctgatgaacatcaggcgctgtggccactcggaaaacttcttcttcatcgaggtgggccgttctgccgtgacggggcccggggagttctggatgcaggtggatgactctgtggtggcccagaacatgcacgagaccatcctggaggccatgcgggccatgagtgatgagttccgccctcgcagcaagagccagtcctcgtccaactgctctaaccccatcagcgtccccctgcgccggcaccatctcaacaatcccccgcccagccaggtggggctgacccgccgatcacgcactgagagcatcaccgccacctccccggccagcatggtgggcgggaagccaggctccttccgtgtccgcgcctccagtgacggcgaaggcaccatgtcccgcccagcctcggtggacggcagccctgtgagtcccagcaccaacagaacccacgcccaccggcatcggggcagcgcccggctgcaccccccgctcaaccacagccgctccatccccatgccggcttcccgctgctcgccttcggccaccagcccggtcagtctgtcgtccagtagcaccagtggccatggctccacctcggattgtctcttcccacggcgatctagtgcttcggtgtctggttcccccagcgatggcggtttcatctcctcggatgagtatggctccagtccctgcgatttccggagttccttccgcagtgtcactccggattccctgggccacaccccaccagcccgcggtgaggaggagctaagcaactatatctgcatgggtggcaaggggccctccaccctgaccgcccccaacggtcactacattttgtctcggggtggcaatggccaccgctgcaccccaggaacaggcttgggcacgagtccagccttggctggggatgaagcagccagtgctgcagatctggataatcggttccgaaagagaactcactcggcaggcacatcccctaccattacccaccagaagaccccgtcccagtcctcagtggcttccattgaggagtacacagagatgatgcctgcctacccaccaggaggtggcagtggaggccgactgccgggacacaggcactccgccttcgtgcccacccgctcctacccagaggagggtctggaaatgcaccccttggagcgtcggggggggcaccaccgcccagacagctccaccctccacacggatgatggctacatgcccatgtccccaggggtggccccagtgcccagtggccgaaagggcagtggagactatatgcccatgagccccaagagcgtatctgccccacagcagatcatcaatcccatcagacgccatccccagagagtggaccccaatggctacatgatgatgtcccccagcggtggctgctctcctgacattggaggtggccccagcagcagcagcagcagcagcaacgccgtcccttccgggaccagctatggaaagctgtggacaaacggggtagggggccaccactctcatgtcttgcctcaccccaaacccccagtggagagcagcggtggtaagctcttaccttgcacaggtgactacatgaacatgtcaccagtgggggactccaacaccagcagcccctccgactgctactacggccctgaggacccccagcacaagccagtcctctcctactactcattgccaagatcctttaagcacacccagcgccccggggagccggaggagggtgcccggcatcagcacctccgcctttccactagctctggtcgccttctctatgctgcaacagcagatgattcttcctcttccaccagcagcgacagcctgggtgggggatactgcggggctaggctggagcccagccttccacatccccaccatcaggttctgcagccccatctgcctcgaaaggtggacacagctgctcagaccaatagccgcctggcccggcccacgaggctgtccctgggggatcccaaggccagcaccttacctcgggcccgagagcagcagcagcagcagcagcccttgctgcaccctccagagcccaagagcccgggggaatatgtcaatattgaatttgggagtgatcagtctggctacttgtctggcccggtggctttccacagctcaccttctgtcaggtgtccatcccagctccagccagctcccagagaggaagagactggcactgaggagtacatgaagatggacctggggccgggccggagggcagcctggcaggagagcactggggtcgagatgggcagactgggccctgcacctcccggggctgctagcatttgcaggcctacccgggcagtgcccagcagccggggtgactacatgaccatgcagatgagttgtccccgtcagagctacgtggacacctcgccagctgcccctgtaagctatgctgacatgcgaacaggcattgctgcagaggaggtgagcctgcccagggccaccatggctgctgcctcctcatcctcagcagcctctgcttccccgactgggcctcaaggggcagcagagctggctgcccactcgtccctgctggggggcccacaaggacctgggggcatgagcgccttcacccgggtgaacctcagtcctaaccgcaaccagagtgccaaagtgatccgtgcagacccacaagggtgccggcggaggcatagctccgagactttctcctcaacacccagtgccacccgggtgggcaacacagtgccctttggagcgggggcagcagtagggggcggtggcggtagcagcagcagcagcgaggatgtgaaacgccacagctctgcttcctttgagaatgtgtggctgaggcctggggagcttgggggagcccccaaggagccagccaaactgtgtggggctgctgggggtttggagaatggtcttaactacatagacctggatttggtcaaggacttcaaacagtgccctcaggagtgcacccctgaaccgcagcctcccccacccccaccccctcatcaacccctgggcagcggtgagagcagctccacccgccgctcaagtgaggatttaagcgcctatgccagcatcagtttccagaagcagccagaggaccgtcagtagctcaactggacatcacagcagaatgaagacctaaatgacctcagcaaatcctcttctaactcatgggtacccagactctaaatatttcatgattcacaactaggacctcatatcttcctcatcagtagatggtacgatgcatccatttcagtttgtttactttatccaatcctcaggatttcattgactgaactgcacgttctatattgtgccaagcgaaaaaaaaaaatgcactgtgacaccagaataatgagtctgcataaacttcatcttcaaccttaaggacttagctggccacagtgagctgatgtgcccaccaccgtgtcatgagagaatgggtttactctcaatgcattttcaagatacatttcatctgctgctgaaactgtgtacgacaaagcatcattgtaaattatttcatacaaaactgttcacgttgggtggagagagtattaaatatttaacataggttttgatttatatgtgtaattttttaaatgaaaatgtaacttttcttacagcacatcttttttttggatgtgggatggaggtatacaatgttctgttgtaaagagtggagcaaatgcttaaaacaaggcttaaaagagtagaatagggtatgatccttgttttaagattgtaattcagaaaacataatataagaatcatagtgccatagatggttctcaattgtatagttatatttgctgatactatctcttgtcatataaacctgatgttgagctgagttccttataagaattaatcttaattttgtattttttcctgtaagacaataggccatgttaattaaactgaagaaggatatatttggctgggtgttttcaaatgtcagcttaaaattggtaattgaatggaagcaaaattataagaagaggaaattaaagtcttccattgcatgtattgtaaacagaaggagatgggtgattccttcaattcaaaagctctctttggaatgaacaatgtgggcgtttgtaaattctggaaatgtctttctattcataataaactagatactgttgatcttttcttctgtcccctccccccaccacttctgtaagtttcctgctctattcccaccatttttttctgtgcacacattatgatatatttcatttcctgcattgtcttgagaaagatggtaaggcaagtgagctgttgctaaccagaaattaaaattccagtaagtgtttttcattatgaccagggctatgtgtcaccttccctaagactcttaccttatctcatattttttgagaacttccagtgttacattatttaactgaatgtaattggcccatttgccttggtgggtgctggcctattagtgattagttaacaaaacacagcgtacagagagcacagaaaagcttaatgacctgctactgaaacacctagccagcagtgaaaatgttaattcttttcttgtttggaaagtatacacgtcttggaattttttccacgtgaaaaacaaatggcaatgaatgcatttaaagatattgccgacagatttttaaatctttttaccaggaaacttcctaaaggttaaatgaattaatgcaaatatcaggctccctctgagtctgtgggagcctctatctctctatcaggaattcgcatccctactattgggaggagcaacattttatttctctgaacgcctaagctccctgggtgggagtggggactacaaggtaggggccagggttggagggcattgtagtggctgctgcctcctgatgaactgtttggggaccccagctctactcaaaagggagcggagataaatggaacccctcacactgctgaggcccgtgttactgttcattcagccaggtggcatgtacctcacagactgttgtgcagtgtccgttattgcagattttaatcatttgcatgctcatcaatttctaagataaatagggtctagagtcataagaatccattgttttcaaggaacttgcagaattacatcatttcctattagtagagagcactacccattttgaaaatctgatatgaaagttgttttttactcttgtaaaaaaagactttcttagtcaaactaacttttcatattttcaagcattctgattcatactcttgctagtggaagaagagagcaagctgccctgctcttttcctttgaggactgaaatagttaaagagaaatcaatgaacaaagtcactcccaaccattttcctgtaaagctggttattatttctcaaggaacctacactttgaatatgtgttaccgagatacctctacatgtggaattatcaacatgttttgaatgagagcagaaatgaacagactggaaaaatctatctcttggtttctatttctctgactttttgagtcgaaaagcataaaggtagaaattcttatttaagctgcttctagtggtgcctgagctggttttgatggtggcatcaaactaccgatttaaaactggaagttgctggtactcaaaccaaaagttcatactctggcgacacgaagggtttcctttgagcaacgtcagctgctgagtccttgtgttcagttcccattgaggagagttggcttttatccatttcaaagcatttgtaggccagccaagggctttcattattgaggcttctagtggcctctggttaacctagaagttagtgggtttttcttgatgacaccaacctctcacagcgtttttccttagagacttaagcagagttttaaaatcctcttttgcgaaaagaacaaatatgttttatgactttgatgatatcttcattctgggcaaaagaatggccctagaaccagctagaagtgaagagaatccattaatgatcaaccacctgagtcaataatgagaaatcagtactgatgttacatttgtggctatttcttgctgactttcaaaggtcaaggactcttgactaatccagtgactgcaaaaatggatctactaaaagtcatctagccagaagtagagatttttaacctttctttccctggcttttgtcttctagctatcatttaaatttgagacatttgaagtattaagaaacaatttttctgtatggtaagaaacagtattttacaatactgaagccctgttttattcaatcttgcatcttgaatacaatataccacaaagtcggaaactttatatttatttactgcaggtggttaaaaaaaggggggaaagggtttcaccatccactgacaacgagagccatgacaaatagtatccatgtgcagtcttccaactgctggtgacaatgaccccatatttggtctcatgctgcttttgcagagcactctgtaggttagtccatcacacaaggaggccctgaatccagacactgtgaattaagaccttggcggggagagatgtgacccttttggtaggaatgggaagaagaatgggtggaagccaatatgaaatttcttctttgcaatgacttgacaggggagttaatgttcctaggatgccatgaatgatgaatgttagttggaggtaatgctgtatatgtgtgtgtgtgtgtgtgtgtgtgtttgtgtgtgtgtatatatatgtgtgtgtgtatatatatgtgacatgtgtgtgtctttgtgtgtgtgtatatatatgtgacgtgtgtgtgggatgtgtgtgtgtatatatagatgaatatatacaaatatatagatatatacacacatatatagatatatatacacatatatagatatatatacacacatatatagatacacatatgtgtgtgtgtgtatatatatatatatatatatatagatgtataggcttgtgagaaacttgagaggaagaagcatgctcttctaggaatgtgaggaaatatgaccttgccaagactaaaagacctctagactgtgagctcagttatggagaacaaaaacagcttcatagtgagtagaacaccgaggataaacactggggccatgggtcctttctgaggcagcgccacagaagatctttgtggtccttccgtagttctgtaagtctgtctcctaagtatgggtagagaatatgtagcctgttgtgtgtctcccactacttgtaaacagagcatcacattaggggcagggaggaggtggaatgatattggaggtgcttaaccctactcgaggaattaattatgaataaagagcttataattagctaacatgactagaaaacacatgacttaggtggagagttagctttcttttctagtttgtgtatgacttgccatttgtgacgtatacaccaaaagatctggtgttttagacttctgccattcacttggcatttaaatctctctttgcttatgctgttaacgagtatgccataggataggacaaattcagtaaacaggaaaacttgtccatatttgcatagacatttgtagggttttttttttctttttctttttagaacttcaccattggcttaagaatgtagttcccaaaacaattttttcttgcaaagtactttccttacacctcttggctacagggtgggccaaattaaacatatatgtattttcatttaatgtatgtgcagtttggtttatcatcttaagatggtggtgctgccccggtgctacttcatctgtgtacacaaagaccaatgcatggtctgtattgctaccaaaacatttactgtatatatgtttataacatgtattatgtatatatgtaatgggtgccaggccaggtatatattttttatttagaagtgtttcacttttccaagttttctttatagtgttatgcttattttcaattttttttttcctgattctgtctggtacttagaattgtagtgtcttcatcatcaattaaagaaaactgtctaaatgaattcatggatgtaaatattagtggtccttaatgtctttgattgctggacatgaaacaaactgccaattaaattttgcggagacaaaaaaaa

SEQ ID NO: 112 - protein, 1242 aa, Homo sapiens
MASPPESDGFSDVRKVGYLRKPKSMHKRFFVLRAASEAGGPARLEYYENEKKWRHKSSAPKRSIPLESCFNINKRADSKNKHLVALYTRDEHFAIAADSEAEQDSWYQALLQLHNRAKGHHDGAAALGAGGGGGSCSGSSGLGEAGEDLSYGDVPPGPAFKEVWQVILKPKGLGQTKNLIGIYRLCLTSKTISFVKLNSEAAAVVLQLMNIRRCGHSENFFFIEVGRSAVTGPGEFWMQVDDSVVAQNMHETILEAMRAMSDEFRPRSKSQSSSNCSNPISVPLRRHHLNNPPPSQVGLTRRSRTESITATSPASMVGGKPGSFRVRASSDGEGTMSRPASVDGSPVSPSTNRTHAHRHRGSARLHPPLNHSRSIPMPASRCSPSATSPVSLSSSSTSGHGSTSDCLFPRRSSASVSGSPSDGGFISSDEYGSSPCDFRSSFRSVTPDSLGHTPPARGEEELSNYICMGGKGPSTLTAPNGHYILSRGGNGHRCTPGTGLGTSPALAGDEAASAADLDNRFRKRTHSAGTSPTITHQKTPSQSSVASIEEYTEMMPAYPPGGGSGGRLPGHRHSAFVPTRSYPEEGLEMHPLERRGGHHRPDSSTLHTDDGYMPMSPGVAPVPSGRKGSGDYMPMSPKSVSAPQQIINPIRRHPQRVDPNGYMMMSPSGGCSPDIGGGPSSSSSSSNAVPSGTSYGKLWTNGVGGHHSHVLPHPKPPVESSGGKLLPCTGDYMNMSPVGDSNTSSPSDCYYGPEDPQHKPVLSYYSLPRSFKHTQRPGEPEEGARHQHLRLSTSSGRLLYAATADDSSSSTSSDSLGGGYCGARLEPSLPHPHHQVLQPHLPRKVDTAAQTNSRLARPTRLSLGDPKASTLPRAREQQQQQQPLLHPPEPKSPGEYVNIEFGSDQSGYLSGPVAFHSSPSVRCPSQLQPAPREEETGTEEYMKMDLGPGRRAAWQESTGVEMGRLGPAPPGAASICRPTRAVPSSRGDYMTMQMSCPRQSYVDTSPAAPVSYADMRTGIAAEEVSLPRATMAAASSSSAASASPTGPQGAAELAAHSSLLGGPQGPGGMSAFTRVNLSPNRNQSAKVIRADPQGCRRRHSSETFSSTPSATRVGNTVPFGAGAAVGGGGGSSSSSEDVKRHSSASFENVWLRPGELGGAPKEPAKLCGAAGGLENGLNYIDLDLVKDFKQCPQECTPEPQPPPPPPPHQPLGSGESSSTRRSSEDLSAYASISFQKQPEDRQ

SEQ ID NO: 113 - DNA, 4015 bp, Homo sapiens
cgaacgagcggcgctcggcggggacagaaagagggagagagagagagagagagagggagaggcgcggccgggcgaggcgggcccgtccgggagcgggctccggggaaggggtgcgggtctgggcgccggagcggggagcggggccgcgtccctctcagcgccagctctacttgagccccacgagccgctgtccccctggcgcgctcggggccgcgggacgggcgcacgccgccttctcctagtcaagtatccgagccgccccgaaactcgggcggcgagtcggccacgggaagtttattctccggctccttttctaaaaggaagaaacagaagtttctcccagcggacagcttttctttccgcctttttggccctgtctgaaatcgggggtccccagggctggcaggccaggctcgctgggctcctaatcttttttttaatttccaatttttgattgggccgtgggtccccgctgagctccggctgcgcgcgggggcgggagggcgcgcgcaggggagggaccgagagacgcgccgactttttagagggagggatcgggtggacaactggtcccgcggcgctcgcagagccggaaagaagtgctgtaagggacgctcgggggacgctgttcctgaggtgtcgccgcctccctgtcctcgccctccgcggtgggggagaaacccaggagcgaagcccagagcccgcggcgcggccggcggacgaacgagcgcgcagcagccggtgcgcggccgcggcgagggcgggggaagaaaaacaccctgtttcctctccggcccccaccgcggatcatgtaccaggattatcccgggaactttgacacctcgtcccggggcagcagcggctctcctgcgcacgccgagtcctactccagcggcggcggcggccagcagaaattccgggtagatatgcctggctcaggcagtgcattcatccccaccatcaacgccatcacgaccagccaggacctgcagtggatggtgcagcccacagtgatcacctccatgtccaacccataccctcgctcgcacccctacagccccctgccgggcctggcctctgtccctggacacatggccctcccaagacctggcgtgatcaagaccattggcaccaccgtgggccgcaggaggagagatgagcagctgtctcctgaagaggaggagaagcgtcgcatccggcgggagaggaacaagctggctgcagccaagtgccggaaccgacgccgggagctgacagagaagctgcaggcggagacagaggagctggaggaggagaagtcaggcctgcagaaggagattgctgagctgcagaaggagaaggagaagctggagttcatgttggtggctcacggcccagtgtgcaagattagccccgaggagcgccgatcgcccccagcccctgggctgcagcccatgcgcagtgggggtggctcggtgggcgctgtagtggtgaaacaggagcccctggaagaggacagcccctcgtcctcgtcggcggggctggacaaggcccagcgctctgtcatcaagcccatcagcattgctgggggcttctacggtgaggagcccctgcacacccccatcgtggtgacctccacacctgctgtcactccgggcacctcgaacctcgtcttcacctatcctagcgtcctggagcaggagtcacccgcatctccctccgaatcctgctccaaggctcaccgcagaagcagtagcagcggggaccaatcatcagactccttgaactcccccactctgctggctctgtaacccagtgcacctccctccccagctccggagggggtcctcctcgctcctccttcccagggaccagcaccttcaagcgctccagggccgtgagggcaagagggggacctgccaccagggagcttcctggctctgggggacccaggtgggacttagcagtgagtattggaagacttgggttgatctcttagaagccatgggacctcctccctcattcatcttgcaagcaaatcccatttcttgaaaagccttggagaactcggtttggtagacttggacatctctctggcttctgaagagcctgaagctggcctggaccattcctgtccctttgttaccatactgtctctggagtgatggtgtccttccctgccccaccacgcatgctcagtgccttttggtttcaccttccctcgacttgaccctttcctcccccagcgtcagtttcactccctcttggtttttatcaaatttgccatgacatttcatctgggtggtctgaatattaaagctcttcatttctggagatggggcagcaggtggctcttctgctggggctgacttgtccagaaggggacaaagtgcaatacagagccttccctaccctgacgcctcccagtcatcatctccagaactcccagcggggctccctgagctctcaaggagatgctgccatcactgggaggctcagaggacccttcctgcccaccttcggagacggcttctggaggaacggcttggccagaagacagggtgtgagtgagacagtggggcacaggttgggtttgccaaacgcctaattaccaggccaggaagcatgccaacaaagccacacgggtgtcctagccagcttcccttcacctggtgtcttgagtagggcgtctcctgtaattactgccttgccattctgcccctggacccttctctccggaccagggaggcgtccctccctaggagccacacattatactccaagtccctgccgggctccgcctttcccccaccctggctctcagggtgacgccacccacagagatttaatgagcgtgggcctggaccttccccagatgctgccaggcagcccctccccaagcctcaaagaagcatttgctgaggatggagaggcaggggagggaggcgggaggccgtcactggagtggcgtctgcagcagctgctgccccagcacccgctcagcctgtcctggctgctcacctccccgcagggcaccgggcctttcctgccctctgtggtcatctgccacctgctggatcaagtgctttctcttttacactcccctgtccccaccccagtgcactcttctggcccaggcagcaagcaagctgtgaacagctggcctgagctgtcgctgtggcttgtggctcatgcgccattcctggttgtctgttgaatctttctggctgctggaattggagataggatgttttgcttcccactgcaggagagctgccccctttcacggggttggggaagggtccccctggcctccagcaggagcacagctcagcagggtccctgctgcccacccctctgagccttttctccccagggtatggctcctgctgagtttcttgtccagcagggccttgacaggaatccagggagtagctcctggccagaaccagcctctgcggggcttgtgctctgcaaagactctgctgctggggattcagctctagaggtcacagtatcctcgtttgaaagataattaagatcccccgtggagaaagcagtgacacattcacacagctgttccctcgcatgttatttcatgaacatgacctgttttcgtgcactagacacacagagtggaacagccgtatgcttaaagtacatgggccagtgggactggaagtgacctgtacaagtgatgcagaaaggagggtttcaaagaaaaaggattttgtttaaaatactttaaaaatgttatttcctgcatcccttggctgtgatgcccctctcccgatttcccaggggctctgggagggacccttctaagaagattgggcagttgggtttctggcttgagatgaatccaagcagcagaatgagccaggagtagcaggagatgggcaaagaaaactggggtgcactcagctctcacaggggtaatcatctcaagtggtatttgtagccaagtgggagctattttcttttttgtgcatatagatatttcttaaatgaaaaaaaaaaaaaaaaaaaaaaaaaa

SEQ ID NO: 114 - protein, 326 aa, Homo sapiens
MYQDYPGNFDTSSRGSSGSPAHAESYSSGGGGQQKFRVDMPGSGSAFIPTINAITTSQDLQWMVQPTVITSMSNPYPRSHPYSPLPGLASVPGHMALPRPGVIKTIGTTVGRRRRDEQLSPEEEEKRRIRRERNKLAAAKCRNRRRELTEKLQAETEELEEEKSGLQKEIAELQKEKEKLEFMLVAHGPVCKISPEERRSPPAPGLQPMRSGGGSVGAVVVKQEPLEEDSPSSSSAGLDKAQRSVIKPISIAGGFYGEEPLHTPIVVTSTPAVTPGTSNLVFTYPSVLEQESPASPSESCSKAHRRSSSSGDQSSDSLNSPTLLAL

SEQ ID NO: 115 - DNA, 1169 bp, Homo sapiens
tgccctgcgcccgcaacccgagccgcacccgccgcggacggagcccatgcgcggggcgaaccgcgcgcccccgcccccgccccgccccggcctcggccccggccctggccccgggggcagtcgcgcctgtgaacggtggggcaggagaccctgtaggaggaccccgggccgcaggcccctgaggagcgatgacggaatataagctggtggtggtgggcgccggcggtgtgggcaagagtgcgctgaccatccagctgatccagaaccattttgtggacgaatacgaccccactatagaggattcctaccggaagcaggtggtcattgatggggagacgtgcctgttggacatcctggataccgccggccaggaggagtacagcgccatgcgggaccagtacatgcgcaccggggagggcttcctgtgtgtgtttgccatcaacaacaccaagtcttttgaggacatccaccagtacagggagcagatcaaacgggtgaaggactcggatgacgtgcccatggtgctggtggggaacaagtgtgacctggctgcacgcactgtggaatctcggcaggctcaggacctcgcccgaagctacggcatcccctacatcgagacctcggccaagacccggcagggagtggaggatgccttctacacgttggtgcgtgagatccggcagcacaagctgcggaagctgaaccctcctgatgagagtggccccggctgcatgagctgcaagtgtgtgctctcctgacgcaggtgagggggactcccagggcggccgccacgcccaccggatgaccccggctccccgcccctgccggtctcctggcctgcggtcagcagcctcccttgtgccccgcccagcacaagctcaggacatggaggtgccggatgcaggaaggaggtgcagacggaaggaggaggaaggaaggacggaagcaaggaaggaaggaagggctgctggagcccagtcaccccgggaccgtgggccgaggtgactgcagaccctcccagggaggctgtgcacagactgtcttgaacatcccaaatgccaccggaaccccagcccttagctcccctcccaggcctctgtgggcccttgtcgggcacagatgggatcacagtaaattattggatggtcttgaaaaaaaaaaaaaaaaaa

SEQ ID NO: 116 - protein, 189 aa, Homo sapiens
MTEYKLVVVGAGGVGKSALTIQLIQNHFVDEYDPTIEDSYRKQVVIDGETCLLDILDTAGQEEYSAMRDQYMRTGEGFLCVFAINNTKSFEDIHQYREQIKRVKDSDDVPMVLVGNKCDLAARTVESRQAQDLARSYGIPYIETSAKTRQGVEDAFYTLVREIRQHKLRKLNPPDESGPGCMSCKCVLS

SEQ ID NO: 117 - DNA, 1061 bp, Homo sapiens
tgccctgcgcccgcaacccgagccgcacccgccgcggacggagcccatgcgcggggcgaaccgcgcgcccccgcccccgccccgccccggcctcggccccggccctggccccgggggcagtcgcgcctgtgaacggtggggcaggagaccctgtaggaggaccccgggccgcaggcccctgaggagcgatgacggaatataagctggtggtggtgggcgccggcggtgtgggcaagagtgcgctgaccatccagctgatccagaaccattttgtggacgaatacgaccccactatagaggattcctaccggaagcaggtggtcattgatggggagacgtgcctgttggacatcctggataccgccggccaggaggagtacagcgccatgcgggaccagtacatgcgcaccggggagggcttcctgtgtgtgtttgccatcaacaacaccaagtcttttgaggacatccaccagtacagggagcagatcaaacgggtgaaggactcggatgacgtgcccatggtgctggtggggaacaagtgtgacctggctgcacgcactgtggaatctcggcaggctcaggacctcgcccgaagctacggcatcccctacatcgagacctcggccaagacccggcagggagtggaggatgccttctacacgttggtgcgtgagatccggcagcacaagctgcggaagctgaaccctcctgatgagagtggccccggctgcatgagctgcaagtgtgtgctctcctgacgcagcacaagctcaggacatggaggtgccggatgcaggaaggaggtgcagacggaaggaggaggaaggaaggacggaagcaaggaaggaaggaagggctgctggagcccagtcaccccgggaccgtgggccgaggtgactgcagaccctcccagggaggctgtgcacagactgtcttgaacatcccaaatgccaccggaaccccagcccttagctcccctcccaggcctctgtgggcccttgtcgggcacagatgggatcacagtaaattattggatggtcttgaaaaaaaaaaaaaaaaaa

SEQ ID NO: 118 - protein, 189 aa, Homo sapiens; identical to SEQ ID NO: 116

SEQ ID NO: 119 - DNA, 1251 bp, Homo sapiens
tgccctgcgcccgcaacccgagccgcacccgccgcggacggagcccatgcgcggggcgaaccgcgcgcccccgcccccgccccgccccggcctcggccccggccctggccccgggggcagtcgcgcctgtgaacggtggggcaggagaccctgtaggaggaccccgggccgcaggcccctgaggagcgatgacggaatataagctggtggtggtgggcgccggcggtgtgggcaagagtgcgctgaccatccagctgatccagaaccattttgtggacgaatacgaccccactatagaggattcctaccggaagcaggtggtcattgatggggagacgtgcctgttggacatcctggataccgccggccaggaggagtacagcgccatgcgggaccagtacatgcgcaccggggagggcttcctgtgtgtgtttgccatcaacaacaccaagtcttttgaggacatccaccagtacagggagcagatcaaacgggtgaaggactcggatgacgtgcccatggtgctggtggggaacaagtgtgacctggctgcacgcactgtggaatctcggcaggctcaggacctcgcccgaagctacggcatcccctacatcgagacctcggccaagacccggcagggcagccgctctggctctagctccagctccgggaccctctgggaccccccgggacccatgtgacccagcggcccctcgcgctggagtggaggatgccttctacacgttggtgcgtgagatccggcagcacaagctgcggaagctgaaccctcctgatgagagtggccccggctgcatgagctgcaagtgtgtgctctcctgacgcaggtgagggggactcccagggcggccgccacgcccaccggatgaccccggctccccgcccctgccggtctcctggcctgcggtcagcagcctcccttgtgccccgcccagcacaagctcaggacatggaggtgccggatgcaggaaggaggtgcagacggaaggaggaggaaggaaggacggaagcaaggaaggaaggaagggctgctggagcccagtcaccccgggaccgtgggccgaggtgactgcagaccctcccagggaggctgtgcacagactgtcttgaacatcccaaatgccaccggaaccccagcccttagctcccctcccaggcctctgtgggcccttgtcgggcacagatgggatcacagtaaattattggatggtcttgaaaaaaaaaaaaaaaaaa

SEQ ID NO: 120 - protein, 170 aa, Homo sapiens
MTEYKLVVVGAGGVGKSALTIQLIQNHFVDEYDPTIEDSYRKQVVIDGETCLLDILDTAGQEEYSAMRDQYMRTGEGFLCVFAINNTKSFEDIHQYREQIKRVKDSDDVPMVLVGNKCDLAARTVESRQAQDLARSYGIPYIETSAKTRQGSRSGSSSSSGTLWDPPGPM

SEQ ID NO: 121 - DNA, 2854 bp, Homo sapiens
tctttgcgcctgattacttctcatgagaggcactccttgttaatgtgctactgagtgtccagatgggcctgctgggctgagcgggctttggatgtgaaccatttcaggaaggggaaccccatcgtcctgttggttctgtgatggcaaatggaggcgtgcaaagactccagaattggaggcatgatgaagactctgctgctgtttgtggggctgctgctgacctgggagagtgggcaggtcctgggggaccagacggtctcagacaatgagctccaggaaatgtccaatcagggaagtaagtacgtcaataaggaaattcaaaatgctgtcaacggggtgaaacagataaagactctcatagaaaaaacaaacgaagagcgcaagacactgctcagcaacctagaagaagccaagaagaagaaagaggatgccctaaatgagaccagggaatcagagacaaagctgaaggagctcccaggagtgtgcaatgagaccatgatggccctctgggaagagtgtaagccctgcctgaaacagacctgcatgaagttctacgcacgcgtctgcagaagtggctcaggcctggttggccgccagcttgaggagttcctgaaccagagctcgcccttctacttctggatgaatggtgaccgcatcgactccctgctggagaacgaccggcagcagacgcacatgctggatgtcatgcaggaccacttcagccgcgcgtccagcatcatagacgagctcttccaggacaggttcttcacccgggagccccaggatacctaccactacctgcccttcagcctgccccaccggaggcctcacttcttctttcccaagtcccgcatcgtccgcagcttgatgcccttctctccgtacgagcccctgaacttccacgccatgttccagcccttccttgagatgatacacgaggctcagcaggccatggacatccacttccatagcccggccttccagcacccgccaacagaattcatacgagaaggcgacgatgaccggactgtgtgccgggagatccgccacaactccacgggctgcctgcggatgaaggaccagtgtgacaagtgccgggagatcttgtctgtggactgttccaccaacaacccctcccaggctaagctgcggcgggagctcgacgaatccctccaggtcgctgagaggttgaccaggaaatacaacgagctgctaaagtcctaccagtggaagatgctcaacacctcctccttgctggagcagctgaacgagcagtttaactgggtgtcccggctggcaaacctcacgcaaggcgaagaccagtactatctgcgggtcaccacggtggcttcccacacttctgactcggacgttccttccggtgtcactgaggtggtcgtgaagctctttgactctgatcccatcactgtgacggtccctgtagaagtctccaggaagaaccctaaatttatggagaccgtggcggagaaagcgctgcaggaataccgcaaaaagcaccgggaggagtgagatgtggatgttgcttttgcacctacgggggcatctgagtccagctccccccaagatgagctgcagccccccagagagagctctgcacgtcaccaagtaaccaggccccagcctccaggcccccaactccgcccagcctctccccgctctggatcctgcactctaacactcgactctgctgctcatgggaagaacagaattgctcctgcatgcaactaattcaataaaactgtcttgtgagctgatcgcttggagggtcctctttttatgttgagttgctgcttcccggcatgccttcattttgctatggggggcaggcaggggggatggaaaataagtagaaacaaaaaagcagtggctaagatggtatagggactgtcataccagtgaagaataaaagggtgaagaataaaagggatatgatgacaaggttgatccacttcaagaattgcttgctttcaggaagagagatgtgtttcaacaagccaactaaaatatattgctgcaaatggaagcttttctgttctattataaaactgtcgatgtattctgaccaaggtgcgacaatctcctaaaggaatacactgaaagttaaggagaagaatcagtaagtgtaaggtgtacttggtattataatgcataattgatgttttcgttatgaaaacatttggtgcccagaagtccaaattatcagttttatttgtaagagctattgcttttgcagcggttttatttgtaaaagctgttgatttcgagttgtaagagctcagcatcccaggggcatcttcttgactgtggcatttcctgtccaccgccggtttatatgatcttcatacctttccctggaccacaggcgtttctcggcttttagtctgaaccatagctgggctgcagtaccctacgctgccagcaggtggccatgactacccgtggtaccaatctcagtcttaaagctcaggcttttcgttcattaacattctctgatagaattctggtcatcagatgtactgcaatggaacaaaactcatctggctgcatcccaggtgtgtagcaaagtccacatgtaaatttatagcttagaatattcttaagtcactgtcccttgtctctctttgaagttataaacaacaaacttaaagcttagcttatgtccaaggtaagtattttagcatggctgtcaaggaaattcagagtaaagtcagtgtgattcacttaatgatatacattaattagaattatggggtcagaggtatttgcttaagtgatcataattgtaaagtatatgtcacattgtcacattaatgtcaaaaaaaaaaaaaaaaaa

SEQ ID NO: 122 - protein, 460 aa, Homo sapiens
MEACKDSRIGGMMKTLLLFVGLLLTWESGQVLGDQTVSDNELQEMSNQGSKYVNKEIQNAVNGVKQIKTLIEKTNEERKTLLSNLEEAKKKKEDALNETRESETKLKELPGVCNETMMALWEECKPCLKQTCMKFYARVCRSGSGLVGRQLEEFLNQSSPFYFWMNGDRIDSLLENDRQQTHMLDVMQDHFSRASSIIDELFQDRFFTREPQDTYHYLPFSLPHRRPHFFFPKSRIVRSLMPFSPYEPLNFHAMFQPFLEMIHEAQQAMDIHFHSPAFQHPPTEFIREGDDDRTVCREIRHNSTGCLRMKDQCDKCREILSVDCSTNNPSQAKLRRELDESLQVAERLTRKYNELLKSYQWKMLNTSSLLEQLNEQFNWVSRLANLTQGEDQYYLRVTTVASHTSDSDVPSGVTEVVVKLFDSDPITVTVPVEVSRKNPKFMETVAEKALQEYRKKHREE

SEQ ID NO: 123 - DNA, 2859 bp, Homo sapiens
ctttccgcggcattctttgggcgtgagtcatgcaggtttgcagccagccccaaagggggtgtgtgcgcgagcagagcgctataaatacggcgcctcccagtgcccacaacgcggcgtcgccaggaggagcgcgcgggcacagggtgccgctgaccgaggcgtgcaaagactccagaattggaggcatgatgaagactctgctgctgtttgtggggctgctgctgacctgggagagtgggcaggtcctgggggaccagacggtctcagacaatgagctccaggaaatgtccaatcagggaagtaagtacgtcaataaggaaattcaaaatgctgtcaacggggtgaaacagataaagactctcatagaaaaaacaaacgaagagcgcaagacactgctcagcaacctagaagaagccaagaagaagaaagaggatgccctaaatgagaccagggaatcagagacaaagctgaaggagctcccaggagtgtgcaatgagaccatgatggccctctgggaagagtgtaagccctgcctgaaacagacctgcatgaagttctacgcacgcgtctgcagaagtggctcaggcctggttggccgccagcttgaggagttcctgaaccagagctcgcccttctacttctggatgaatggtgaccgcatcgactccctgctggagaacgaccggcagcagacgcacatgctggatgtcatgcaggaccacttcagccgcgcgtccagcatcatagacgagctcttccaggacaggttcttcacccgggagccccaggatacctaccactacctgcccttcagcctgccccaccggaggcctcacttcttctttcccaagtcccgcatcgtccgcagcttgatgcccttctctccgtacgagcccctgaacttccacgccatgttccagcccttccttgagatgatacacgaggctcagcaggccatggacatccacttccatagcccggccttccagcacccgccaacagaattcatacgagaaggcgacgatgaccggactgtgtgccgggagatccgccacaactccacgggctgcctgcggatgaaggaccagtgtgacaagtgccgggagatcttgtctgtggactgttccaccaacaacccctcccaggctaagctgcggcgggagctcgacgaatccctccaggtcgctgagaggttgaccaggaaatacaacgagctgctaaagtcctaccagtggaagatgctcaacacctcctccttgctggagcagctgaacgagcagtttaactgggtgtcccggctggcaaacctcacgcaaggcgaagaccagtactatctgcgggtcaccacggtggcttcccacacttctgactcggacgttccttccggtgtcactgaggtggtcgtgaagctctttgactctgatcccatcactgtgacggtccctgtagaagtctccaggaagaaccctaaatttatggagaccgtggcggagaaagcgctgcaggaataccgcaaaaagcaccgggaggagtgagatgtggatgttgcttttgcacctacgggggcatctgagtccagctccccccaagatgagctgcagccccccagagagagctctgcacgtcaccaagtaaccaggccccagcctccaggcccccaactccgcccagcctctccccgctctggatcctgcactctaacactcgactctgctgctcatgggaagaacagaattgctcctgcatgcaactaattcaataaaactgtcttgtgagctgatcgcttggagggtcctctttttatgttgagttgctgcttcccggcatgccttcattttgctatggggggcaggcaggggggatggaaaataagtagaaacaaaaaagcagtggctaagatggtatagggactgtcataccagtgaagaataaaagggtgaagaataaaagggatatgatgacaaggttgatccacttcaagaattgcttgctttcaggaagagagatgtgtttcaacaagccaactaaaatatattgctgcaaatggaagcttttctgttctattataaaactgtcgatgtattctgaccaaggtgcgacaatctcctaaaggaatacactgaaagttaaggagaagaatcagtaagtgtaaggtgtacttggtattataatgcataattgatgttttcgttatgaaaacatttggtgcccagaagtccaaattatcagttttatttgtaagagctattgcttttgcagcggttttatttgtaaaagctgttgatttcgagttgtaagagctcagcatcccaggggcatcttcttgactgtggcatttcctgtccaccgccggtttatatgatcttcatacctttccctggaccacaggcgtttctcggcttttagtctgaaccatagctgggctgcagtaccctacgctgccagcaggtggccatgactacccgtggtaccaatctcagtcttaaagctcaggcttttcgttcattaacattctctgatagaattctggtcatcagatgtactgcaatggaacaaaactcatctggctgcatcccaggtgtgtagcaaagtccacatgtaaatttatagcttagaatattcttaagtcactgtcccttgtctctctttgaagttataaacaacaaacttaaagcttagcttatgtccaaggtaagtattttagcatggctgtcaaggaaattcagagtaaagtcagtgtgattcacttaatgatatacattaattagaattatggggtcagaggtatttgcttaagtgatcataattgtaaagtatatgtcacattgtcacattaatgtcaaaaaaaaaaaaaaaaaa

SEQ ID NO: 124 - protein, 501 aa, Homo sapiens
MQVCSQPQRGCVREQSAINTAPPSAHNAASPGGARGHRVPLTEACKDSRIGGMMKTLLLFVGLLLTWESGQVLGDQTVSDNELQEMSNQGSKYVNKEIQNAVNGVKQIKTLIEKTNEERKTLLSNLEEAKKKKEDALNETRESETKLKELPGVCNETMMALWEECKPCLKQTCMKFYARVCRSGSGLVGRQLEEFLNQSSPFYFWMNGDRIDSLLENDRQQTHMLDVMQDHFSRASSIIDELFQDRFFTREPQDTYHYLPFSLPHRRPHFFFPKSRIVRSLMPFSPYEPLNFHAMFQPFLEMIHEAQQAMDIHFHSPAFQHPPTEFIREGDDDRTVCREIRHNSTGCLRMKDQCDKCREILSVDCSTNNPSQAKLRRELDESLQVAERLTRKYNELLKSYQWKMLNTSSLLEQLNEQFNWVSRLANLTQGEDQYYLRVTTVASHTSDSDVPSGVTEVVVKLFDSDPITVTVPVEVSRKNPKFMETVAEKALQEYRKKHREE

SEQ ID NO: 125 - DNA, 2979 bp, Homo sapiens
gggcagcctgctgtcggcttagaggggatgggcagtgtggagggcctggcagagcaagaggactcatccttccaaagggactttctctgggaagcctgctcctcgggccactgcgaaccctctctactctccgaagggaattgtccttcctggcttccactacttccacccctgaatgcacaggcagcccggcccaagtctcccactagggatgcagatggattcggtgtgaagggctggctgctgttgcctccggctcttgaaagtcaagttcagaggcgtgcaaagactccagaattggaggcatgatgaagactctgctgctgtttgtggggctgctgctgacctgggagagtgggcaggtcctgggggaccagacggtctcagacaatgagctccaggaaatgtccaatcagggaagtaagtacgtcaataaggaaattcaaaatgctgtcaacggggtgaaacagataaagactctcatagaaaaaacaaacgaagagcgcaagacactgctcagcaacctagaagaagccaagaagaagaaagaggatgccctaaatgagaccagggaatcagagacaaagctgaaggagctcccaggagtgtgcaatgagaccatgatggccctctgggaagagtgtaagccctgcctgaaacagacctgcatgaagttctacgcacgcgtctgcagaagtggctcaggcctggttggccgccagcttgaggagttcctgaaccagagctcgcccttctacttctggatgaatggtgaccgcatcgactccctgctggagaacgaccggcagcagacgcacatgctggatgtcatgcaggaccacttcagccgcgcgtccagcatcatagacgagctcttccaggacaggttcttcacccgggagccccaggatacctaccactacctgcccttcagcctgccccaccggaggcctcacttcttctttcccaagtcccgcatcgtccgcagcttgatgcccttctctccgtacgagcccctgaacttccacgccatgttccagcccttccttgagatgatacacgaggctcagcaggccatggacatccacttccatagcccggccttccagcacccgccaacagaattcatacgagaaggcgacgatgaccggactgtgtgccgggagatccgccacaactccacgggctgcctgcggatgaaggaccagtgtgacaagtgccgggagatcttgtctgtggactgttccaccaacaacccctcccaggctaagctgcggcgggagctcgacgaatccctccaggtcgctgagaggttgaccaggaaatacaacgagctgctaaagtcctaccagtggaagatgctcaacacctcctccttgctggagcagctgaacgagcagtttaactgggtgtcccggctggcaaacctcacgcaaggcgaagaccagtactatctgcgggtcaccacggtggcttcccacacttctgactcggacgttccttccggtgtcactgaggtggtcgtgaagctctttgactctgatcccatcactgtgacggtccctgtagaagtctccaggaagaaccctaaatttatggagaccgtggcggagaaagcgctgcaggaataccgcaaaaagcaccgggaggagtgagatgtggatgttgcttttgcacctacgggggcatctgagtccagctccccccaagatgagctgcagccccccagagagagctctgcacgtcaccaagtaaccaggccccagcctccaggcccccaactccgcccagcctctccccgctctggatcctgcactctaacactcgactctgctgctcatgggaagaacagaattgctcctgcatgcaactaattcaataaaactgtcttgtgagctgatcgcttggagggtcctctttttatgttgagttgctgcttcccggcatgccttcattttgctatggggggcaggcaggggggatggaaaataagtagaaacaaaaaagcagtggctaagatggtatagggactgtcataccagtgaagaataaaagggtgaagaataaaagggatatgatgacaaggttgatccacttcaagaattgcttgctttcaggaagagagatgtgtttcaacaagccaactaaaatatattgctgcaaatggaagcttttctgttctattataaaactgtcgatgtattctgaccaaggtgcgacaatctcctaaaggaatacactgaaagttaaggagaagaatcagtaagtgtaaggtgtacttggtattataatgcataattgatgttttcgttatgaaaacatttggtgcccagaagtccaaattatcagttttatttgtaagagctattgcttttgcagcggttttatttgtaaaagctgttgatttcgagttgtaagagctcagcatcccaggggcatcttcttgactgtggcatttcctgtccaccgccggtttatatgatcttcatacctttccctggaccacaggcgtttctcggcttttagtctgaaccatagctgggctgcagtaccctacgctgccagcaggtggccatgactacccgtggtaccaatctcagtcttaaagctcaggcttttcgttcattaacattctctgatagaattctggtcatcagatgtactgcaatggaacaaaactcatctggctgcatcccaggtgtgtagcaaagtccacatgtaaatttatagcttagaatattcttaagtcactgtcccttgtctctctttgaagttataaacaacaaacttaaagcttagcttatgtccaaggtaagtattttagcatggctgtcaaggaaattcagagtaaagtcagtgtgattcacttaatgatatacattaattagaattatggggtcagaggtatttgcttaagtgatcataattgtaaagtatatgtcacattgtcacattaatgtcaaaaaaaaaaaaaaaaaa

SEQ ID NO: 126 - protein, 449 aa, Homo sapiens
MMKTLLLFVGLLLTWESGQVLGDQTVSDNELQEMSNQGSKYVNKEIQNAVNGVKQIKTLIEKTNEERKTLLSNLEEAKKKKEDALNETRESETKLKELPGVCNETMMALWEECKPCLKQTCMKFYARVCRSGSGLVGRQLEEFLNQSSPFYFWMNGDRIDSLLENDRQQTHMLDVMQDHFSRASSIIDELFQDRFFTREPQDTYHYLPFSLPHRRPHFFFPKSRIVRSLMPFSPYEPLNFHAMFQPFLEMIHEAQQAMDIHFHSPAFQHPPTEFIREGDDDRTVCREIRHNSTGCLRMKDQCDKCREILSVDCSTNNPSQAKLRRELDESLQVAERLTRKYNELLKSYQWKMLNTSSLLEQLNEQFNWVSRLANLTQGEDQYYLRVTTVASHTSDSDVPSGVTEVVVKLFDSDPITVTVPVEVSRKNPKFMETVAEKALQEYRKKHREE

SEQ ID NO: 127 - DNA, 2248 bp, Homo sapiens
gggcctcccaaagtgctgggattacaggcatgagccaccgtgcccagcctcaaagcatattttaaaggatagaaataaacagccatatgaagagatacagacagggcggtctggaagggtccagagcaggagcttctatctccatagagttggggttacgtcaccctctgggcacattctgtcagcctccacacgttcagccctcagaagctcccgaaccctgtcctttgggccttttatggagaactccattggctgtccatgactgaagcatggacaactgtgataatgtgattgggcaaaaagggtctgatctaagcccagcaaggccagtccagattctttgggcctttgtgcagcattcctttctccagggtatggggcaaggacccactctggaatgaggatcctacaacccacaatcagattagagtcctgccttgggcagctgaaaagaggacaggagaaggtcagagagacgaaaggctgttttttgaggcctgaggcaccccaacatgacaacgtaagactgtaaccatggtcatgtgagttatgagctaggaaccctggacgaaaccagcacatatacaatcatctcccacctcccaacgcctttactttcacagcctctgcagcaaactgcggtcactataatcgctcctgtggcacagaggcatacccaggggaatctgcccagggggccactctgtgcccacgtgggaacccacacctgcttgtaaagcctcccctccctctgaccagcaaccaggacagtttgttgttccaagcagtgggctcatgtctgttttggctcagaacagggtggggagagcgggccagggacccgcaggaaggcttatccttgagattgcgtgggagacacaacaaggggtgggggcccgcaggcggggcggggcgaagcaggtgatatcaagcccagagccccagcctctccccacagtctcaccatggcccgcaccgtggtgctcatcaccggctgttcctcgggcatcggcctgcacttggccgtacgtctggcttcagatccatcccagagcttcaaagtgtatgccacgttgagggacctgaaaacacagggccggctgtgggaggcggcccgggccctggcatgccctccgggatccctggagacgttgcagctggacgtaagggactcaaaatccgtggccgctgcccgggaacgcgtgactgagggccgcgtggacgtgctggtgtgtaacgcaggcctgggcctgctggggccgctggaggcgctgggggaggacgccgtggcctctgtgctggacgtgaatgtagtagggactgtgcggatgctgcaggccttcctgccagacatgaagaggcgcggttcgggacgcgtgttggtgaccgggagcgtgggaggattgatggggctgcctttcaatgacgtttattgcgccagcaagttcgcgctcgaaggcttatgcgagagtctggcggttctgctgctgccctttggggtccacttgagcctgatcgagtgcggcccagtgcacaccgccttcatggagaaggtgttgggcagcccagaggaggtgctggaccgcacggacatccacaccttccaccgcttctaccaatacctcgcccacagcaagcaagtctttcgcgaggcggcgcagaaccctgaggaggtggcggaggtcttcctcaccgctttgcgcgccccgaagccgaccctgcgctacttcaccaccgagcgcttcctgcccctgctgcggatgcgcctggacgaccccagcggctccaactacgtcaccgccatgcaccgggaagtgttcggcgacgttccggcaaaggccgaggctggggccgaggctgggggcggggccgggcctggggcagaggacgaggccgggcgcggtgcggtgggggaccctgagctcggcgatcctccggccgccccgcagtaaaggcttcctcagccgctgtctcccgcgcccttctttgtcccctgggtctgtgtggtccctggggatggggcggcggtagcagctgtgggtggctaattaagatagatcgcgttagccagttttaccagcgcagctaggcgcgatggctgtcgcctgtaatgccagcgctttgggaggcggaggcaggaggatcgctcaagccccggagttggagaccagccagagcaacacagtgagacccccatctctacaaaaataaagaaaatttaaaaatcaaaaaaaaaaaaaaaaaa

SEQ ID NO: 128 - protein, 328 aa, Homo sapiens
MARTVVLITGCSSGIGLHLAVRLASDPSQSFKVYATLRDLKTQGRLWEAARALACPPGSLETLQLDVRDSKSVAAARERVTEGRVDVLVCNAGLGLLGPLEALGEDAVASVLDVNVVGTVRMLQAFLPDMKRRGSGRVLVTGSVGGLMGLPFNDVYCASKFALEGLCESLAVLLLPFGVHLSLIECGPVHTAFMEKVLGSPEEVLDRTDIHTFHRFYQYLAHSKQVFREAAQNPEEVAEVFLTALRAPKPTLRYFTTERFLPLLRMRLDDPSGSNYVTAMHREVFGDVPAKAEAGAEAGGGAGPGAEDEAGRGAVGDPELGDPPAAPQ

SEQ ID NO: 129 - DNA, 3503 bp, Homo sapiens
ggcgcgtacgcgggtcacgtgagggcgcggcgcggcagcagctccggcggccgagacgggggcggcggccgcgcgggtctggcgggaccggtttggaagactttgccggcctgcagattggccttaagagaaggacggagccacatactgctgacggcccagaactggcagagagaaggttgccatggctgctgttgacagtttctacctcttgtacagggaaatcgccaggtcttgcaattgctatatggaagctctagctttggttggagcctggtatacggccagaaaaagcatcactgtcatctgtgacttttacagcctgatcaggctgcattttatcccccgcctggggagcagagcagacttgatcaagcagtatggaagatgggccgttgtcagcggtgcaacagatgggattggaaaagcctacgctgaagagttagcaagccgaggtctcaatataatcctgattagtcggaacgaggagaagttgcagtatttcactcagctgtccgaggacaagctctgggacatcataaatgtgaacattgccgccgctagtttgatggtccatgttgtgttaccgggaatggtggagagaaagaaaggtgccatcgtcacgatctcttctggctcctgctgcaaacccactcctcagctggctgcattttctgcttctaaggcttatttagaccacttcagcagagccttgcaatatgaatatgcctctaaaggaatctttgtacagagtctaatccctttctatgtagccaccagcatgacagcacccagcaactttctgcacaggtgctcgtggttggtgccttcgccaaaagtctatgcacatcatgctgtttctactcttgggatttccaaaaggaccacaggatattggtcccattctattcagtttctttttgcacagtatatgcctgaatggctctgggtgtggggagcaaatattctcaaccgttcactacgtaaggaagccttatcctgcacagcctgagtctggatggccacttgagaagttttgccaactcctgggaacctcgatattctgacatttggaaaaacacatttaatttatctcctgtgtttcattgctgattattcagcatactgttgattcgtcatttgcaaaacacacataataccgtcagagtgctgtgaaaaaccttaagggtgtgtggatggcacaggatcaataatgcctgaggctgattgacgacatctacatttcagtgctttttccctaagctgtttgaaagttacgcttttctgttgttctagagccacagcagtctaatattgaaatataatatgatttgtcaggtcttataatttcagatgttgttttttaagggaaattgaccatttcactagaggagttgtgctggtttttaaatgtgcatcaagaaagactactgaaaagtattattttgtaactaagattgctggtactattaggaaaaatctgtgtgtattgtatagctctagctgtttgactatctgtaatgaaaatgctgcacttcaactggtatttcattagagaaccgtgtgtgtgcgtgtgtgtggtgcctttgagcaactttatttatggttaccatatttttaaaaagattttttgtcagggtgacttaacatggactcttatagggtattaaaacaatctagattattccttttcatcctaaataagcctaccaaatttcatgctgttggtttgccatgaatgatattacttcctacattatatttgtgttttttcaaatctgctatggaatgaacttattcctagatttggatatgtaagagaaacctgcagtcatcttttgatttataaggcaattcttgtggataaatagtgatttctcagcctctgacccattttataactgaaatttagccctttagagcttgttatatctggttttcctacgtttttctatgtaatattattccattccagtagcattattgatagaaatagtaagtatttatggaatagtaaaatatggacaaattacgtgtgtgacatatctgtcaatataagttagaagcttattcttggtttgtgtaatgaatttatgtattgtagtgaatacctttactggtgtgaagataattatgcacaaaccctcacaatacgcgttaacattgaaacctgtgaaatgtccttagtttgggtcatataaagccaaccatttttgaggaccatgtacctagtgctttgaaaactctaagtcactatatgaatatgacaatatgtgcacatttaaaattcagagctcggcattgtgatactgatgcagaagctagtagattggttaaaagtctggacttctgtggcatttttttcgtgacgtgataatctatcataagcagacctaagcacagttttatgaacacaattttgcccatgacattgcctacaggatttccagatgtgacttgcactcagaagatcagtggtcaacttcagaagctcttccacgcttagatcatgtcttcagaacttagatgtgaaaatctacacactgggagatgctgtgagccccaaggttttgatggagtttgcttggaatcctcttgacttcatgccacattgacgtgaactttgatgtataataagcagcagcaacttcatgtgaaaatatggtcaggtagttatatgtaaggttacgtggtccagtaatgtcttagattgataaattaggtatggaatccatcagtgttacgtgatgagaataggtgaacacaccttgtcagtgatgatgtaaacttctctccttggcaggacatgggcaaacatgctgattggtgcaaatgtggtgccgagctgtccatagctgcagtgaaagatgaagagcaagaccttctctaggttttctagctttcattaaatgtatttttttccccagagctaatttgaaagttgattggaccactgtggatggggtgtcattaagaatgtgggaaataggggccgagtgcggtggctcacacctgtaatcccagcagtttggaaggccagggcaggtggatcgcttgatcccaggaggtcgagaccagcctggggaacacatcctgtctctacaaaaaatacaaaaattagccaggcagggtggtgcatgcctgtagtcccagctacttgggaggctgaggcaggagaattttttgagcccaggatgcagaggttgaagtgagccaagatcgtgccactgcactccagccttgagacagagcgagaccctgtctcaaaaaaaaaaaaagaacgtgggaaatatgaacctttgaaagttaatctgtgaattgaaagtttaacaataaaagtagttgtttgtttcctttggaagagttttgttccagatgtttgtaatttggttgtttgtaatttggaatgagagaatttttttttcttaggagtgattgcaagaaattaacatgaacaacagtggtcataactgattaaaagctgacacgtcagtaacaaaatt

SEQ ID NO: 130 - protein, 275 aa, Homo sapiens
MAAVDSFYLLYREIARSCNCYMEALALVGAWYTARKSITVICDFYSLIRLHFIPRLGSRADLIKQYGRWAVVSGATDGIGKAYAEELASRGLNIILISRNEEKLQYFTQLSEDKLWDIINVNIAAASLMVHVVLPGMVERKKGAIVTISSGSCCKPTPQLAAFSASKAYLDHFSRALQYEYASKGIFVQSLIPFYVATSMTAPSNFLHRCSWLVPSPKVYAHHAVSTLGISKRTTGYWSHSIQFLFAQYMPEWLWVWGANILNRSLRKEALSCTA

SEQ ID NO: 131 - DNA, 3668 bp, Homo sapiens
ggcgcgtacgcgggtcacgtgagggcgcggcgcggcagcagctccggcggccgagacgggggcggcggccgcgcgggtctggcgggaccggtttggaagactttgccggcctgcagattggccttaagagaaggacggagccacatactgctgacggcccagaactggcagagagaaggttgccatggctgctgttgacagtttctacctcttgtacagggaaatcgccaggtcttgcaattgctatatggaagctctagctttggttggagcctggtatacggccagaaaaagcatcactgtcatctgtgacttttacagcctgatcaggctgcattttatcccccgcctggggagcagagcagacttgatcaagcagtatggaagatgggccgttgtcagcggtgcaacagatgggattggaaaagcctacgctgaagagttagcaagccgaggtctcaatataatcctgattagtcggaacgaggagaagttgcaggttgttgctaaagacatagccgacacgtacaaagtggaaactgatattatagttgcggacttcagcagcggtcgtgagatctaccttccaattcgagaagccctgaaggacaaagacgttggcatcttggtaaataacgtgggtgtgttttatccctacccgcagtatttcactcagctgtccgaggacaagctctgggacatcataaatgtgaacattgccgccgctagtttgatggtccatgttgtgttaccgggaatggtggagagaaagaaaggtgccatcgtcacgatctcttctggctcctgctgcaaacccactcctcagctggctgcattttctgcttctaaggcttatttagaccacttcagcagagccttgcaatatgaatatgcctctaaaggaatctttgtacagagtctaatccctttctatgtagccaccagcatgacagcacccagcaactttctgcacaggtgctcgtggttggtgccttcgccaaaagtctatgcacatcatgctgtttctactcttgggatttccaaaaggaccacaggatattggtcccattctattcagtttctttttgcacagtatatgcctgaatggctctgggtgtggggagcaaatattctcaaccgttcactacgtaaggaagccttatcctgcacagcctgagtctggatggccacttgagaagttttgccaactcctgggaacctcgatattctgacatttggaaaaacacatttaatttatctcctgtgtttcattgctgattattcagcatactgttgattcgtcatttgcaaaacacacataataccgtcagagtgctgtgaaaaaccttaagggtgtgtggatggcacaggatcaataatgcctgaggctgattgacgacatctacatttcagtgctttttccctaagctgtttgaaagttacgcttttctgttgttctagagccacagcagtctaatattgaaatataatatgatttgtcaggtcttataatttcagatgttgttttttaagggaaattgaccatttcactagaggagttgtgctggtttttaaatgtgcatcaagaaagactactgaaaagtattattttgtaactaagattgctggtactattaggaaaaatctgtgtgtattgtatagctctagctgtttgactatctgtaatgaaaatgctgcacttcaactggtatttcattagagaaccgtgtgtgtgcgtgtgtgtggtgcctttgagcaactttatttatggttaccatatttttaaaaagattttttgtcagggtgacttaacatggactcttatagggtattaaaacaatctagattattccttttcatcctaaataagcctaccaaatttcatgctgttggtttgccatgaatgatattacttcctacattatatttgtgttttttcaaatctgctatggaatgaacttattcctagatttggatatgtaagagaaacctgcagtcatcttttgatttataaggcaattcttgtggataaatagtgatttctcagcctctgacccattttataactgaaatttagccctttagagcttgttatatctggttttcctacgtttttctatgtaatattattccattccagtagcattattgatagaaatagtaagtatttatggaatagtaaaatatggacaaattacgtgtgtgacatatctgtcaatataagttagaagcttattcttggtttgtgtaatgaatttatgtattgtagtgaatacctttactggtgtgaagataattatgcacaaaccctcacaatacgcgttaacattgaaacctgtgaaatgtccttagtttgggtcatataaagccaaccatttttgaggaccatgtacctagtgctttgaaaactctaagtcactatatgaatatgacaatatgtgcacatttaaaattcagagctcggcattgtgatactgatgcagaagctagtagattggttaaaagtctggacttctgtggcatttttttcgtgacgtgataatctatcataagcagacctaagcacagttttatgaacacaattttgcccatgacattgcctacaggatttccagatgtgacttgcactcagaagatcagtggtcaacttcagaagctcttccacgcttagatcatgtcttcagaacttagatgtgaaaatctacacactgggagatgctgtgagccccaaggttttgatggagtttgcttggaatcctcttgacttcatgccacattgacgtgaactttgatgtataataagcagcagcaacttcatgtgaaaatatggtcaggtagttatatgtaaggttacgtggtccagtaatgtcttagattgataaattaggtatggaatccatcagtgttacgtgatgagaataggtgaacacaccttgtcagtgatgatgtaaacttctctccttggcaggacatgggcaaacatgctgattggtgcaaatgtggtgccgagctgtccatagctgcagtgaaagatgaagagcaagaccttctctaggttttctagctttcattaaatgtatttttttccccagagctaatttgaaagttgattggaccactgtggatggggtgtcattaagaatgtgggaaataggggccgagtgcggtggctcacacctgtaatcccagcagtttggaaggccagggcaggtggatcgcttgatcccaggaggtcgagaccagcctggggaacacatcctgtctctacaaaaaatacaaaaattagccaggcagggtggtgcatgcctgtagtcccagctacttgggaggctgaggcaggagaattttttgagcccaggatgcagaggttgaagtgagccaagatcgtgccactgcactccagccttgagacagagcgagaccctgtctcaaaaaaaaaaaaagaacgtgggaaatatgaacctttgaaagttaatctgtgaattgaaagtttaacaataaaagtagttgtttgtttcctttggaagagttttgttccagatgtttgtaatttggttgtttgtaatttggaatgagagaatttttttttcttaggagtgattgcaagaaattaacatgaacaacagtggtcataactgattaaaagctgacacgtcagtaacaaaatt

SEQ ID NO: 132 - protein, 330 aa, Homo sapiens
MAAVDSFYLLYREIARSCNCYMEALALVGAWYTARKSITVICDFYSLIRLHFIPRLGSRADLIKQYGRWAVVSGATDGIGKAYAEELASRGLNIILISRNEEKLQVVAKDIADTYKVETDIIVADFSSGREIYLPIREALKDKDVGILVNNVGVFYPYPQYFTQLSEDKLWDIINVNIAAASLMVHVVLPGMVERKKGAIVTISSGSCCKPTPQLAAFSASKAYLDHFSRALQYEYASKGIFVQSLIPFYVATSMTAPSNFLHRCSWLVPSPKVYAHHAVSTLGISKRTTGYWSHSIQFLFAQYMPEWLWVWGANILNRSLRKEALSCTA

SEQ ID NO: 133 - DNA, 1939 bp, Homo sapiens
ccctctcgcgccccaggccggtgtacccccgcactccgcgccccggcctagaagctctctctccccgctccccggcccggcccccgccccgccccgccccagcccgctgggccgccatggagcgctggccttggccgtcgggcggcgcctggctgctcgtggctgcccgcgcgctgctgcagctgctgcgctcagacctgcgtctgggccgcccgctgctggcggcgctggcgctgctggccgcgctcgactggctgtgccagcgcctgctgcccccgccggccgcactcgccgtgctggccgccgccggctggatcgcgttgtcccgcctggcgcgcccgcagcgcctgccggtggccactcgcgcggtgctcatcaccggctgtgactctggttttggcaaggagacggccaagaaactggactccatgggcttcacggtgctggccaccgtattggagttgaacagccccggtgccatcgagctgcgtacctgctgctcccctcgcctaaggctgctgcagatggacctgaccaaaccaggagacattagccgcgtgctagagttcaccaaggcccacaccaccagcaccggcctgtggggcctcgtcaacaacgcaggccacaatgaagtagttgctgatgcggagctgtctccagtggccactttccgtagctgcatggaggtgaatttctttggcgcgctcgagctgaccaagggcctcctgcccctgctgcgcagctcaaggggccgcatcgtgactgtggggagcccagcgggggacatgccatatccgtgcttgggggcctatggaacctccaaagcggccgtggcgctactcatggacacattcagctgtgaactccttccctggggggtcaaggtcagcatcatccagcctggctgcttcaagacagagtcagtgagaaacgtgggtcagtgggaaaagcgcaagcaattgctgctggccaacctgcctcaagagctgctgcaggcctacggcaaggactacatcgagcacttgcatgggcagttcctgcactcgctacgcctggccatgtccgacctcaccccagttgtagatgccatcacagatgcgctgctggcagctcggccccgccgccgctattaccccggccagggcctggggctcatgtacttcatccactactacctgcctgaaggcctgcggcgccgcttcctgcaggccttcttcatcagtcactgtctgcctcgagcactgcagcctggccagcctggcactaccccaccacaggacgcagcccaggacccaaacctgagccccggcccttccccagcagtggctcggtgagccatgtgcacctatggcccagccactgcagcacaggaggctccgtgagcccttggttcctccccgaaaacccccagcattacgatcccccaagtgtcctggaccctggcctaaagaatcccacccccacttcatgcccactgccgatgcccaatccaggcccggtgaggccaaggtttcccagtgagcctctgcgcctctccactgtttcatgagcccaaacaccctcctggcacaacgctctaccctgcagcttggagaactccgctggatggggagtctcatgcaagacttcactgcagcctttcacaggactctgcagatagtgcctctgcaaactaaggagtgactaggtgggttggggaccccctcaggattgtttctcggcaccagtgcctcagtgctgcaattgagggctaaatcccaagtgtctcttgactggctcaagaattagggccccaactacacacccccaagccacagggaagcatgtactgtacttcccaattgccacattttaaataaagacaaatttttatttcttctaaaaaaaaaaaaaaaaaaaaaaaaaaaaaaaaaaaaaaaaaaaaaaaaaaaaaaaaaaa

SEQ ID NO: 134 - protein, 405 aa, Homo sapiens
MERWPWPSGGAWLLVAARALLQLLRSDLRLGRPLLAALALLAALDWLCQRLLPPPAALAVLAAAGWIALSRLARPQRLPVATRAVLITGCDSGFGKETAKKLDSMGFTVLATVLELNSPGAIELRTCCSPRLRLLQMDLTKPGDISRVLEFTKAHTTSTGLWGLVNNAGHNEVVADAELSPVATFRSCMEVNFFGALELTKGLLPLLRSSRGRIVTVGSPAGDMPYPCLGAYGTSKAAVALLMDTFSCELLPWGVKVSIIQPGCFKTESVRNVGQWEKRKQLLLANLPQELLQAYGKDYIEHLHGQFLHSLRLAMSDLTPVVDAITDALLAARPRRRYYPGQGLGLMYFIHYYLPEGLRRRFLQAFFISHCLPRALQPGQPGTTPPQDAAQDPNLSPGPSPAVAR

SEQ ID NO: 135 - DNA, 3897 bp, Homo sapiens
cagtttgcaaaagccagaggtgcaagaagcagcgactgcagcagcagcagcagcagcggcggtggcagcagcagcagcagcggcggcagcagcagcagcagcggaggcaccggtggcagcagcagcatcaccagcaacaacaacaaaaaaaaatcctcatcaaatcctcacctaagctttcagtgtatccagatccacatcttcactcaagccaggagagggaaagaggaaaggggggcaggaaaaaaaaaaaacccaacaacttagcggaaacttctcagagaatgctccaaaactcagcagtgcttctggtgctggtgatcagtgcttctgcaacccatgaggcggagcagaatgactctgtgagccccaggaaatcccgagtggcggctcaaaactcagctgaagtggttcgttgcctcaacagtgctctacaggtcggctgcggggcttttgcatgcctggaaaactccacctgtgacacagatgggatgtatgacatctgtaaatccttcttgtacagcgctgctaaatttgacactcagggaaaagcattcgtcaaagagagcttaaaatgcatcgccaacggggtcacctccaaggtcttcctcgccattcggaggtgctccactttccaaaggatgattgctgaggtgcaggaagagtgctacagcaagctgaatgtgtgcagcatcgccaagcggaaccctgaagccatcactgaggtcgtccagctgcccaatcacttctccaacagatactataacagacttgtccgaagcctgctggaatgtgatgaagacacagtcagcacaatcagagacagcctgatggagaaaattgggcctaacatggccagcctcttccacatcctgcagacagaccactgtgcccaaacacacccacgagctgacttcaacaggagacgcaccaatgagccgcagaagctgaaagtcctcctcaggaacctccgaggtgaggaggactctccctcccacatcaaacgcacatcccatgagagtgcataaccagggagaggttattcacaacctcaccaaactagtatcattttaggggtgttgacacaccagttttgagtgtactgtgcctggtttgatttttttaaagtagttcctattttctatcccccttaaagaaaattgcatgaaactaggcttctgtaatcaatatcccaacattctgcaatggcagcattcccaccaacaaaatccatgtgaccattctgcctctcctcaggagaaagtaccctcttttaccaacttcctctgccatgtttttcccctgctcccctgagaccacccccaaacacaaaacattcatgtaactctccagccattgtaatttgaagatgtggatccctttagaacggttgccccagtagagttagctgataaggaaactttatttaaatgcatgtcttaaatgctcataaagatgttaaatggaattcgtgttatgaatctgtgctggccatggacgaatatgaatgtcacatttgaattcttgatctctaatgagctagtgtcttatggtcttgatcctccaatgtctaattttctttccgacacatttaccaaattgcttgagcctggctgtccaaccagactttgagcctgcatcttcttgcatctaatgaaaaacaaaaagctaacatctttacgtactgtaactgctcagagctttaaaagtatctttaacaattgtcttaaaaccagagaatcttaaggtctaactgtggaatataaatagctgaaaactaatgtactgtacataaattccagaggactctgcttaaacaaagcagtatataataactttattgcatatagatttagttttgtaacttagctttatttttcttttcctgggaatggaataactatctcacttccagatatccacataaatgctccttgtggccttttttataactaagggggtagaagtagttttaattcaacatcaaaacttaagatgggcctgtatgagacaggaaaaaccaacaggtttatctgaaggaccccaggtaagatgttaatctcccagcccacctcaacccagaggctactcttgacttagacctatactgaaagatctctgtcacatccaactggaaattccaggaaccaaaaagagcatccctatgggcttggaccacttacagtgtgataaggcctactatacattaggaagtggcagttctttactcgtcccctttcatcggtgcctggtactctggcaaatgatgatggggtgggagactttccattaaatcaatcaggaatgagtcaatcagcctttaggtctttagtccgggggacttggggctgagagagtataaataaccctgggctgtccagccttaatagacttctcttacattttcgtcctgtagcacgctgcctgccaaagtagtcctggcagctggaccatctctgtaggatcgtaaaaaaatagaaaaaaagaaaaaaaaaagaaagaaagagggaaaaagagctggtggtttgatcatttctgccatgatgtttacaagatggcgaccaccaaagtcaaacgactaacctatctatgaacaacagtagtttctcagggtcactgtccttgaacccaacagtcccttatgagcgtcactgcccaccaaaggtcaatgtcaagagaggaagagagggaggaggggtaggactgcaggggccactccaaactcgcttaggtagaaactattggtgcttgactctcactaggctaaactcaagatttgaccaaatcgagtgatagggatcctggtgggaggagagagggcacatctccagaaaaatgaaaagcaatacaactttaccataaagcctttaaaaccagtaacgtgctgctcaaggaccaagagcaattgcagcagacccagcagcagcagcagcagcacaaacattgctgcctttgtccccacacagcctctaagcgtgctgacatcagattgttaagggcatttttatactcagaactgtcccatccccaggtccccaaacttatggacactgccttagcctcttggaaatcaggtagaccatattctaagttagactcttcccctccctcccacacttcccacccccaggcaaggctgacttctctgaatcagaaaagctattaaagtttgtgtgttgtgtccattttgcaaacccaactaagccaggaccccaatgcgacaagtagttcatgagtattcctagcaaatttctctctttcttcagttcagtagatttccttttttcttttctttttttttttttttttttttggctgtgacctcttcaaaccgtggtacccccccttttctccccacgatgatatctatatatgtatctacaatacatatatctacacatacagaaagaagcagttctcacaatgttgctagttttttgcttctctttcccccaccctactccctccaattcccccttaaacttccaaagcttcgtcttgtgtttgctgcagagtgattcgggggctgacctagaccagtttgcatgattcttctcttgtgatttggttgcactttagacatttttgtgccattatatttgcattatgtatttataatttaaatgatatttaggtttttggctgagtactggaataaacagtgagcatatctggtatatgtcattatttattgttaaattacatttttaagctccatgtgcatataaaggttatgaaacatatcatggtaatgacagatgcaagttattttatttgcttatttttataattaaagatgccatagcataatatgaagcctttggtgaattccttctaagataaaaataataataaagtgttacgttttattggtttcaaaaaaaaaaaaaaaaaaaa

SEQ ID NO: 136 - protein, 247 aa, Homo sapiens
MLQNSAVLLVLVISASATHEAEQNDSVSPRKSRVAAQNSAEVVRCLNSALQVGCGAFACLENSTCDTDGMYDICKSFLYSAAKFDTQGKAFVKESLKCIANGVTSKVFLAIRRCSTFQRMIAEVQEECYSKLNVCSIAKRNPEAITEVVQLPNHFSNRYYNRLVRSLLECDEDTVSTIRDSLMEKIGPNMASLFHILQTDHCAQTHPRADFNRRRTNEPQKLKVLLRNLRGEEDSPSHIKRTSHESA

SEQ ID NO: 137 - DNA, 1936 bp, Homo sapiens
agcctgcagcaggaggaaggacgtgaacattttatcagcttctggtatggccttgagctggtagttataatcttggccctggtggcccagggctacagtcatcctagcagtccccgctgaagtggagcaggtacagtcacagctgtggggacagcatgctggccaagggtcttcccccacgctcagtcctggtcaaaggctgccagacctttctgagtgcccccagggaggggctggggcgtctcagggtgcccactggcgagggagctggcatctccacccgcagtcctcgccccttcaatgagatcccctctcctggtgacaatggctggctaaacctgtaccatttctggagggagacgggcacacacaaagtccaccttcaccatgtccagaatttccagaagtatggcccgatttacagggagaagctcggcaacgtggagtcggtttatgtcatcgaccctgaagatgtggcccttctctttaagtccgagggccccaacccagaacgattcctcatcccgccctgggtcgcctatcaccagtattaccagagacccataggagtcctgttgaagaagtcggcagcctggaagaaagaccgggtggccctgaaccaggaggtgatggctccagaggccaccaagaactttttgcccctgttggatgcagtgtctcgggacttcgtcagtgtcctgcacaggcgcatcaagaaggcgggctccggaaattactcgggggacatcagtgatgacctgttccgctttgcctttgagtccatcactaacgtcatttttggggagcgccaggggatgctggaggaagtagtgaaccccgaggcccagcgattcattgatgccatctaccagatgttccacaccagcgtccccatgctcaaccttcccccagacctgttccgtctgttcaggaccaagacctggaaggaccatgtggctgcatgggacgtgattttcagtaaagctgacatatacacccagaacttctactgggaattgagacagaaaggaagtgttcaccacgattaccgtggcatcctctacagactcctgggagacagcaagatgtccttcgaggacatcaaggccaacgtcacagagatgctggcaggaggggtggacacgacgtccatgaccctgcagtggcacttgtatgagatggcacgcaacctgaaggtgcaggatatgctgcgggcagaggtcttggctgcgcggcaccaggcccagggagacatggccacgatgctacagctggtccccctcctcaaagccagcatcaaggagacactaagacttcaccccatctccgtgaccctgcagagatatcttgtaaatgacttggttcttcgagattacatgattcctgccaagacactggtgcaagtggccatctatgctctgggccgagagcccaccttcttcttcgacccggaaaattttgacccaacccgatggctgagcaaagacaagaacatcacctacttccggaacttgggctttggctggggtgtgcggcagtgtctgggacggcggatcgctgagctagagatgaccatcttcctcatcaatatgctggagaacttcagagttgaaatccaacacctcagcgatgtgggcaccacattcaacctcattctgatgcctgaaaagcccatctccttcaccttctggccctttaaccaggaagcaacccagcagtgatcagagaggatggcctgcagccacatgggaggaaggcccaggggtggggcccatggggtctctgcatcttcagtcgtctgtcccaagtcctgctcctttctgcccagcctgctcagcaggttgaatgggttctcagtggtcaccttcctcagctcagctgggccactcctcttcacccaccccatggagacaataaacagctgaaccatgaaaaa

SEQ ID NO: 138 - protein, 521 aa, Homo sapiens
MLAKGLPPRSVLVKGCQTFLSAPREGLGRLRVPTGEGAGISTRSPRPFNEIPSPGDNGWLNLYHFWRETGTHKVHLHHVQNFQKYGPIYREKLGNVESVYVIDPEDVALLFKSEGPNPERFLIPPWVAYHQYYQRPIGVLLKKSAAWKKDRVALNQEVMAPEATKNFLPLLDAVSRDFVSVLHRRIKKAGSGNYSGDISDDLFRFAFESITNVIFGERQGMLEEVVNPEAQRFIDAIYQMFHTSVPMLNLPPDLFRLFRTKTWKDHVAAWDVIFSKADIYTQNFYWELRQKGSVHHDYRGILYRLLGDSKMSFEDIKANVTEMLAGGVDTTSMTLQWHLYEMARNLKVQDMLRAEVLAARHQAQGDMATMLQLVPLLKASIKETLRLHPISVTLQRYLVNDLVLRDYMIPAKTLVQVAIYALGREPTFFFDPENFDPTRWLSKDKNITYFRNLGFGWGVRQCLGRRIAELEMTIFLINMLENFRVEIQHLSDVGTTFNLILMPEKPISFTFWPFNQEATQQ

SEQ ID NO: 139 - DNA, 2010 bp, Homo sapiens
gctagcgacagacccagcattcctcccagcgcacgccgccgcccgggccgcgctattccgaaattgggtccgccctagcgtggcccccggcctgctcctgcgctcttcgcgggtcgctcacctccgcctcccctcgacacagcccgagcccatccgccccccgggtcgacccgcgtttacctcagggcgaggtccaggcgctcggccccgcggaggcggcggcggccccaccgcaggttcctaggtcccagtcactctgccgccaagttccccaacacggactccgtgcgctttgaggtgttacgggggcgctggagcactggcttcgctggccctgccaggaggcggcggcgaagcagggagcgacccggtatgcgtttctctgcccggcctgcggccctgcagcatccactcctcgcctctgctggcctctgccctcgctcgctgcgttcacccgagctcacccgagcccaccggagccgacagtggcgcgctaagggagaagctcggcaacgtggagtcggtttatgtcatcgaccctgaagatgtggcccttctctttaagtccgagggccccaacccagaacgattcctcatcccgccctgggtcgcctatcaccagtattaccagagacccataggagtcctgttgaagaagtcggcagcctggaagaaagaccgggtggccctgaaccaggaggtgatggctccagaggccaccaagaactttttgcccctgttggatgcagtgtctcgggacttcgtcagtgtcctgcacaggcgcatcaagaaggcgggctccggaaattactcgggggacatcagtgatgacctgttccgctttgcctttgagtccatcactaacgtcatttttggggagcgccaggggatgctggaggaagtagtgaaccccgaggcccagcgattcattgatgccatctaccagatgttccacaccagcgtccccatgctcaaccttcccccagacctgttccgtctgttcaggaccaagacctggaaggaccatgtggctgcatgggacgtgattttcagtaaagctgacatatacacccagaacttctactgggaattgagacagaaaggaagtgttcaccacgattaccgtggcatcctctacagactcctgggagacagcaagatgtccttcgaggacatcaaggccaacgtcacagagatgctggcaggaggggtggacacgacgtccatgaccctgcagtggcacttgtatgagatggcacgcaacctgaaggtgcaggatatgctgcgggcagaggtcttggctgcgcggcaccaggcccagggagacatggccacgatgctacagctggtccccctcctcaaagccagcatcaaggagacactaagacttcaccccatctccgtgaccctgcagagatatcttgtaaatgacttggttcttcgagattacatgattcctgccaagacactggtgcaagtggccatctatgctctgggccgagagcccaccttcttcttcgacccggaaaattttgacccaacccgatggctgagcaaagacaagaacatcacctacttccggaacttgggctttggctggggtgtgcggcagtgtctgggacggcggatcgctgagctagagatgaccatcttcctcatcaatatgctggagaacttcagagttgaaatccaacacctcagcgatgtgggcaccacattcaacctcattctgatgcctgaaaagcccatctccttcaccttctggccctttaaccaggaagcaacccagcagtgatcagagaggatggcctgcagccacatgggaggaaggcccaggggtggggcccatggggtctctgcatcttcagtcgtctgtcccaagtcctgctcctttctgcccagcctgctcagcaggttgaatgggttctcagtggtcaccttcctcagctcagctgggccactcctcttcacccaccccatggagacaataaacagctgaaccatgaaaaa

SEQ ID NO: 140 - protein, 363 aa, Homo sapiens
MAPEATKNFLPLLDAVSRDFVSVLHRRIKKAGSGNYSGDISDDLFRFAFESITNVIFGERQGMLEEVVNPEAQRFIDAIYQMFHTSVPMLNLPPDLFRLFRTKTWKDHVAAWDVIFSKADIYTQNFYWELRQKGSVHHDYRGILYRLLGDSKMSFEDIKANVTEMLAGGVDTTSMTLQWHLYEMARNLKVQDMLRAEVLAARHQAQGDMATMLQLVPLLKASIKETLRLHPISVTLQRYLVNDLVLRDYMIPAKTLVQVAIYALGREPTFFFDPENFDPTRWLSKDKNITYFRNLGFGWGVRQCLGRRIAELEMTIFLINMLENFRVEIQHLSDVGTTFNLILMPEKPISFTFWPFNQEATQQ

SEQ ID NO: 141 - DNA, 1215 bp, Homo sapiens
cgtcagttggtcacgtggttgttcggagcgggcgagcggagttagcagggctttactgcagagcgcgccgggcactccagcgaccgtggggatcagcgtaggtgagctgtggccttttgcgaggtgctgcagccatagctacgtgcgttcgctacgaggattgagcgtctccacccagtaagtgggcaagaggcggcaggaagtgggtacgcaggggcgcaaggcgcacagcctctagacgactcgctttccctccggccaacctctgaagccgcgtcctactttgacagctgcagggccgcggcctggtcttctgtgcttcaccatctacataatgaatcccagtatgaagcagaaacaagaagaaatcaaagagaatataaagaatagttctgtcccaagaagaactctgaagatgattcagccttctgcatctggatctcttgttggaagagaaaatgagctgtccgcaggcttgtccaaaaggaaacatcggaatgaccacttaacatctacaacttccagccctggggttattgtcccagaatctagtgaaaataaaaatcttggaggagtcacccaggagtcatttgatcttatgattaaagaaaatccatcctctcagtattggaaggaagtggcagaaaaacggagaaaggcgctgtatgaagcacttaaggaaaatgagaaacttcataaagaaattgaacaaaaggacaatgaaattgcccgcctgaaaaaggagaataaagaactggcagaagtagcagaacatgtacagtatatggcagagctaatagagagactgaatggtgaacctctggataattttgaatcactggataatcaggaatttgattctgaagaagaaactgttgaggattctctagtggaagactcagaaattggcacgtgtgctgaaggaactgtatcttcctctacggatgcaaagccatgtatatgaaatgcattaatatttgactgttgagaattttactgccgaagtttacctccactagttctttgtagcagagtacataactacataatgccaactctggaatcaaatttccttgtttgaatcctgggaccctattgcattaaagtacaaatactatgtatttttaatctatgatggtttatgtgaataggattttctcagttgtcagccatgacttatgtttattactaaataaacttcaaactcctgttgaa

SEQ ID NO: 142 - protein, 209 aa, Homo sapiens
MNPSMKQKQEEIKENIKNSSVPRRTLKMIQPSASGSLVGRENELSAGLSKRKHRNDHLTSTTSSPGVIVPESSENKNLGGVTQESFDLMIKENPSSQYWKEVAEKRRKALYEALKENEKLHKEIEQKDNEIARLKKENKELAEVAEHVQYMAELIERLNGEPLDNFESLDNQEFDSEEETVEDSLVEDSEIGTCAEGTVSSSTDAKPCI

SEQ ID NO: 143 - DNA, 1730 bp, Homo sapiens
gcataaagctccagtccttcctccagggatgaggcagtaaggacttggactcctctgtccagcttttaacaatctaagttacgccctcttctgggtcacgctagaatcagatctgctctccagcatcttctgtttcctggcaagtgtttcctgctactttggattggccacgatgggctggagctgccttgtgacaggagcaggagggcttctgggtcagaggatcgtccgcctgttggtggaagagaaggaactgaaggagatcagggccttggacaaggccttcagaccagaattgagagaggaattttctaagctccagaacaggaccaagctgactgtacttgaaggagacattctggatgagccattcctgaaaagagcctgccaggacgtctcggtcgtcatccacaccgcctgtatcattgatgtctttggtgtcactcacagagagtccatcatgaatgtcaatgtgaaaggtacccagctactgttggaggcctgtgtccaagccagtgtgccagtcttcatctacaccagtagcatagaggtagccgggcccaactcctacaaggaaatcatccagaacggccacgaagaagagcctctggaaaacacatggcccactccatacccgtacagcaaaaagcttgctgagaaggctgtgctggcggctaatgggtggaatctaaaaaatggtgataccttgtacacttgtgcgttaagacccacatatatctatggggaaggaggcccattcctttctgccagtataaatgaggccctgaacaacaatgggatcctgtcaagtgttggaaagttctctacagtcaacccagtctatgttggcaacgtggcctgggcccacattctggccttgagggctctgcgggaccccaagaaggccccaagtgtccgaggtcaattctattacatctcagatgacacgcctcaccaaagctatgataaccttaattacatcctgagcaaagagtttggcctccgccttgattccagatggagccttcctttaaccctgatgtactggattggcttcctgctggaagtagtgagcttcctactcagcccaatttactcctatcaaccccccttcaaccgccacacagtcacattatcaaatagtgtgttcaccttctcttacaagaaggctcagcgagatctggcgtataagccactctacagctgggaggaagccaagcagaaaaccgtggagtgggttggttcccttgtggaccggcacaaggagaccctgaagtccaagactcagtgatttaaggatgacagagatgtgcatgtgggtattgttaggaaatgtcatcaaactccacccacctggcttcatacagaaggcaacaggggcacaagcccaggtcctgctgcctctctttcacacaatgcccaacttactgtcttcttcatgtcatcaaaatctgcacagtcactggcccaaccagaactttctgtcctaatcatacaccagaagacaaacaatatgatttgctgttaccaaatctcagtggctgattctgaacaattgtggtctctcttaacttgaggttctcttttgactaatagagctccatttcccctcttaaatgagaaagcatttcttttctctttaatctcctattccttcacacagttcaacataaagagcaataaatgttttaatgcttaacatggagagaaaaaaaaaaaaaaaaaaaaaa

SEQ ID NO: 144 - protein, 372 aa, Homo sapiens
MGWSCLVTGAGGLLGQRIVRLLVEEKELKEIRALDKAFRPELREEFSKLQNRTKLTVLEGDILDEPFLKRACQDVSVVIHTACIIDVFGVTHRESIMNVNVKGTQLLLEACVQASVPVFIYTSSIEVAGPNSYKEIIQNGHEEEPLENTWPTPYPYSKKLAEKAVLAANGWNLKNGDTLYTCALRPTYIYGEGGPFLSASINEALNNNGILSSVGKFSTVNPVYVGNVAWAHILALRALRDPKKAPSVRGQFYYISDDTPHQSYDNLNYILSKEFGLRLDSRWSLPLTLMYWIGFLLEVVSFLLSPIYSYQPPFNRHTVTLSNSVFTFSYKKAQRDLAYKPLYSWEEAKQKTVEWVGSLVDRHKETLKSKTQ

SEQ ID NO: 145 - DNA, 1807 bp, Homo sapiens
aaggctaaagccaagactctttatcacactgtggccttaagattggatttctcttcctgttcctgggaagaattagagatataacctaaaggtcactattattctgagaaaagggattctggaggaggagggagcaatgagtatgtggcaggagttcaagccctcttctgggtcacgctagaatcagatctgctctccagcatcttctgtttcctggcaagtgtttcctgctactttggattggccacgatgggctggagctgccttgtgacaggagcaggagggcttctgggtcagaggatcgtccgcctgttggtggaagagaaggaactgaaggagatcagggccttggacaaggccttcagaccagaattgagagaggaattttctaagctccagaacaggaccaagctgactgtacttgaaggagacattctggatgagccattcctgaaaagagcctgccaggacgtctcggtcgtcatccacaccgcctgtatcattgatgtctttggtgtcactcacagagagtccatcatgaatgtcaatgtgaaaggtacccagctactgttggaggcctgtgtccaagccagtgtgccagtcttcatctacaccagtagcatagaggtagccgggcccaactcctacaaggaaatcatccagaacggccacgaagaagagcctctggaaaacacatggcccactccatacccgtacagcaaaaagcttgctgagaaggctgtgctggcggctaatgggtggaatctaaaaaatggtgataccttgtacacttgtgcgttaagacccacatatatctatggggaaggaggcccattcctttctgccagtataaatgaggccctgaacaacaatgggatcctgtcaagtgttggaaagttctctacagtcaacccagtctatgttggcaacgtggcctgggcccacattctggccttgagggctctgcgggaccccaagaaggccccaagtgtccgaggtcaattctattacatctcagatgacacgcctcaccaaagctatgataaccttaattacatcctgagcaaagagtttggcctccgccttgattccagatggagccttcctttaaccctgatgtactggattggcttcctgctggaagtagtgagcttcctactcagcccaatttactcctatcaaccccccttcaaccgccacacagtcacattatcaaatagtgtgttcaccttctcttacaagaaggctcagcgagatctggcgtataagccactctacagctgggaggaagccaagcagaaaaccgtggagtgggttggttcccttgtggaccggcacaaggagaccctgaagtccaagactcagtgatttaaggatgacagagatgtgcatgtgggtattgttaggaaatgtcatcaaactccacccacctggcttcatacagaaggcaacaggggcacaagcccaggtcctgctgcctctctttcacacaatgcccaacttactgtcttcttcatgtcatcaaaatctgcacagtcactggcccaaccagaactttctgtcctaatcatacaccagaagacaaacaatatgatttgctgttaccaaatctcagtggctgattctgaacaattgtggtctctcttaacttgaggttctcttttgactaatagagctccatttcccctcttaaatgagaaagcatttcttttctctttaatctcctattccttcacacagttcaacataaagagcaataaatgttttaatgcttaacatggagagaaaaaaaaaaaaaaaaaaaaaa

SEQ ID NO: 146 - protein, 372 aa, Homo sapiens; identical to SEQ ID NO: 144

SEQ ID NO: 147 - DNA, 4422 bp, Homo sapiens
gggagtttctggagggctgaacacgtggaggcaaacaggaaggtgaagaagaacttatcctatcaggacggaaggtcctgtgctcgggatcttccagacgtcgcgactctaaattgccccctctgaggtcaaggaacacaagatggttttggaaatgctgaacccgatacattataacatcaccagcatcgtgcctgaagccatgcctgctgccaccatgccagtcctgctcctcactggcctttttctcttggtgtggaattatgagggcacatcctcaataccaggtcctggctactgcatgggaattggacccctcatctcccacggcagattcctgtggatggggatcggcagtgcctgcaactactacaaccgggtatatggagaattcatgcgagtctggatctctggagaggaaacactcattatcagcaagtcctcaagtatgttccacataatgaagcacaatcattacagctctcgattcggcagcaaacttgggctgcagtgcatcggtatgcatgagaaaggcatcatatttaacaacaatccagagctctggaaaacaactcgacccttctttatgaaagctctgtcaggccccggccttgttcgtatggtcacagtctgtgctgaatccctcaaaacacatctggacaggttggaggaggtgaccaatgaatcgggctatgtggacgtgttgacccttctgcgtcgtgtcatgctggacacctctaacacgctcttcttgaggatccctttggacgaaagtgctatcgtggttaaaatccaaggttattttgatgcatggcaagctctcctcatcaaaccagacatcttctttaagatttcttggctatacaaaaagtatgagaagtctgtcaaggatttgaaagatgccatagaagttctgatagcagaaaaaagacgcaggatttccacagaagagaaactggaagaatgtatggactttgccactgagttgattttagcagagaaacgtggtgacctgacaagagagaatgtgaaccagtgcatattggaaatgctgatcgcagctcctgacaccatgtctgtctctttgttcttcatgctatttctcattgcaaagcaccctaatgttgaagaggcaataataaaggaaatccagactgttattggtgagagagacataaagattgatgatatacaaaaattaaaagtgatggaaaacttcatttatgagagcatgcggtaccagcctgtcgtggacttggtcatgcgcaaagccttagaagatgatgtaatcgatggctacccagtgaaaaaggggacaaacattatcctgaatattggaaggatgcacagactcgagtttttccccaaacccaatgaatttactcttgaaaattttgcaaagaatgttccttataggtactttcagccatttggctttgggccccgtggctgtgcaggaaagtacatcgccatggtgatgatgaaagccatcctcgttacacttctgagacgattccacgtgaagacattgcaaggacagtgtgttgagagcatacagaagatacacgacttgtccttgcacccagatgagactaaaaacatgctggaaatgatctttaccccaagaaactcagacaggtgtctggaacactagagaaggctggtcagtacccactctggagcatttctcatcagtagttcacatacaaatcatccatccttgccaatagtgtcatcctcacagtgaacactcagtggcccatggcattttataggcatacctcctatgggttgtcaccaagctaggtgctatttgtcatctgctcctgttcacaccagagaaccaggctacaagagaaaaagcagaggccaagagtttgagggagaaatagtcggtgaagaaaccgtatccataaagacccgattccaccaaatgtgctttgagaaggataggccttcattaacaaaatgtatgtctggttccccagtagagctctactgcctcaacccaaggggatttttatgtctggggcagaaacactcaagttgattagaaagaccaggccaatgtcagggtacctggggccaaacccacctgctagtgtgaattaaagtactttaattttgttttctgtggaggtggaaaagcaacattcatagtctttggagaaatgcttagaaattcagcatttgacccttgctgtgaattaagcccaattaattcctgtttgtctacatatgatctgtctgtggcaaaagtttaatcagaggaaattctttcccagtctgtcgatttatgcctcagccacttgcctgtgctacaattcattgtgttacctgtagattcaggtaatacaaactatatataatcatcaagtaatacaaactaatttagtaatagcctgggttaagtattattagggccctgtgtctgctgtagaaaaaaaaattcacatgatgcacttcaaattcaaataaaaatccttttggcatgttcccatttttgcttagctcaattagtgtggctaaccaagagataactgtaaatgtgacattgatttgctcttactacagcttcagtgattgggggaggaaaagtcccaacccaatgggctcaaacttctaaggggtactcctctcatccccttatccttctccctcgacattttctccctctttcttcccatgaccccaaagccaagggcaacagatcagtaaagaacgtggtcagagtagaacccctgaagtattttttaatcctacctcaaaatttaacagttacctgagagatttaacattatctagttcattgaatcattgtatgtggtcatggataaattgcacaccttggaattcgctttctaaaggaaatcaaatgaatggaggaactttccaaacaccactttacttgtgttatatagccaatataactatctctactgaatgtcattgaaaaactaaaaaattaaacttatttacaaataggtaaatatttgtcattgaatccattgccatcccatttgactgttcttttcatcctactgtctagtaataagctgagtataagatgacagtgtaatctccctgaaagcaggagctactttctttcttttgtaatctatttccatccccatttccctgtcctgtctccctgtattcactcccaagctcagttctgaatagacattcctgctcagagatactcccaactgatgcagaaaccaaataaagaggtaggtattccaagaattcaagaatggacattagtaaagaataaaacatttatttgagcttggaattatttggatcatctatatggcctaaaaatatatggactatgcctgtgtacctgaatacgtatgtagtcaggtcaagacaatcatccaaataacttagacccctaaaagcaaggccaggatttgcaatttaatgtgtcccaattaattcacttgaaaattagtaacactctgtttacgttgcctctggctggagctgcatggtggaagaagcccaactttggatccatgtacttcacccatccaatactcttgggacatttatgtgtattttatctgtatatatgaagccaatgtctatgtctacacagtcaaagtgaaatgcatgtttgatatagctgtacatagatatctattttgcaggtacaaaaatatcctgggggaaaactgggagtggaagggtggggggtgggagtgagggacatgggggagggacaggaagaggagaagtgttggtttgaacgatccaagcaaactctcccagaatcaaattacctgggtagttgttcaacttttcactctgcttagcctgtatagacaaaccccatatatttgtagaggcttggccttggaattctggaataccattggcttttcagtaggctgatgaacacattttgaaaattctattatcttcagaattttgccccattgttaagtgcttaaccgtcactcttgaatgtgcaatgtgctgtggattccattttcatcagttctgaaagaactgcaatgtgtaaattatcagtgaaatgcatgcatataagggctctatcattatcaaattgtaaggacaattgtacccttctatatctttgggcatgctagacacccccatgccttcattgagatcccattttccccctctcaagtggaaaataatcacatccagcaagctctctcattattgagaaataccatttggaaattgccactttttattcctaagcagcacctttcactgttcatgatgctaatgttccacaaaagcatgtgccattggcccactgaaggatagagggacccttttcaatctatatcagctgggctctgggactgaatctctcacctattcttgcagaaagacatactaattaaaccttgtcaaagtaaaaaaaaaaaaaaaaaa

SEQ ID NO: 148 - protein, 503 aa, Homo sapiens
MVLEMLNPIHYNITSIVPEAMPAATMPVLLLTGLFLLVWNYEGTSSIPGPGYCMGIGPLISHGRFLWMGIGSACNYYNRVYGEFMRVWISGEETLIISKSSSMFHIMKHNHYSSRFGSKLGLQCIGMHEKGIIFNNNPELWKTTRPFFMKALSGPGLVRMVTVCAESLKTHLDRLEEVTNESGYVDVLTLLRRVMLDTSNTLFLRIPLDESAIVVKIQGYFDAWQALLIKPDIFFKISWLYKKYEKSVKDLKDAIEVLIAEKRRRISTEEKLEECMDFATELILAEKRGDLTRENVNQCILEMLIAAPDTMSVSLFFMLFLIAKHPNVEEAIIKEIQTVIGERDIKIDDIQKLKVMENFIYESMRYQPVVDLVMRKALEDDVIDGYPVKKGTNIILNIGRMHRLEFFPKPNEFTLENFAKNVPYRYFQPFGFGPRGCAGKYIAMVMMKAILVTLLRRFHVKTLQGQCVESIQKIHDLSLHPDETKNMLEMIFTPRNSDRCLEH

SEQ ID NO: 149 - DNA, 4531 bp, Homo sapiens
gggagtttctggagggctgaacacgtggaggcaaacaggaaggtgaagaagaacttatcctatcaggacggaaggtcctgtgctcgggatcttccagacgtcgcgcggtgtcagaaaccctgtggtgaaattcagcctgtggattccagaaatttggagtgttcttggggggaaaaatccgcacacacaaagcaacatttggaaatccctgtggactctaaattgccccctctgaggtcaaggaacacaagatggttttggaaatgctgaacccgatacattataacatcaccagcatcgtgcctgaagccatgcctgctgccaccatgccagtcctgctcctcactggcctttttctcttggtgtggaattatgagggcacatcctcaataccaggtcctggctactgcatgggaattggacccctcatctcccacggcagattcctgtggatggggatcggcagtgcctgcaactactacaaccgggtatatggagaattcatgcgagtctggatctctggagaggaaacactcattatcagcaagtcctcaagtatgttccacataatgaagcacaatcattacagctctcgattcggcagcaaacttgggctgcagtgcatcggtatgcatgagaaaggcatcatatttaacaacaatccagagctctggaaaacaactcgacccttctttatgaaagctctgtcaggccccggccttgttcgtatggtcacagtctgtgctgaatccctcaaaacacatctggacaggttggaggaggtgaccaatgaatcgggctatgtggacgtgttgacccttctgcgtcgtgtcatgctggacacctctaacacgctcttcttgaggatccctttggacgaaagtgctatcgtggttaaaatccaaggttattttgatgcatggcaagctctcctcatcaaaccagacatcttctttaagatttcttggctatacaaaaagtatgagaagtctgtcaaggatttgaaagatgccatagaagttctgatagcagaaaaaagacgcaggatttccacagaagagaaactggaagaatgtatggactttgccactgagttgattttagcagagaaacgtggtgacctgacaagagagaatgtgaaccagtgcatattggaaatgctgatcgcagctcctgacaccatgtctgtctctttgttcttcatgctatttctcattgcaaagcaccctaatgttgaagaggcaataataaaggaaatccagactgttattggtgagagagacataaagattgatgatatacaaaaattaaaagtgatggaaaacttcatttatgagagcatgcggtaccagcctgtcgtggacttggtcatgcgcaaagccttagaagatgatgtaatcgatggctacccagtgaaaaaggggacaaacattatcctgaatattggaaggatgcacagactcgagtttttccccaaacccaatgaatttactcttgaaaattttgcaaagaatgttccttataggtactttcagccatttggctttgggccccgtggctgtgcaggaaagtacatcgccatggtgatgatgaaagccatcctcgttacacttctgagacgattccacgtgaagacattgcaaggacagtgtgttgagagcatacagaagatacacgacttgtccttgcacccagatgagactaaaaacatgctggaaatgatctttaccccaagaaactcagacaggtgtctggaacactagagaaggctggtcagtacccactctggagcatttctcatcagtagttcacatacaaatcatccatccttgccaatagtgtcatcctcacagtgaacactcagtggcccatggcattttataggcatacctcctatgggttgtcaccaagctaggtgctatttgtcatctgctcctgttcacaccagagaaccaggctacaagagaaaaagcagaggccaagagtttgagggagaaatagtcggtgaagaaaccgtatccataaagacccgattccaccaaatgtgctttgagaaggataggccttcattaacaaaatgtatgtctggttccccagtagagctctactgcctcaacccaaggggatttttatgtctggggcagaaacactcaagttgattagaaagaccaggccaatgtcagggtacctggggccaaacccacctgctagtgtgaattaaagtactttaattttgttttctgtggaggtggaaaagcaacattcatagtctttggagaaatgcttagaaattcagcatttgacccttgctgtgaattaagcccaattaattcctgtttgtctacatatgatctgtctgtggcaaaagtttaatcagaggaaattctttcccagtctgtcgatttatgcctcagccacttgcctgtgctacaattcattgtgttacctgtagattcaggtaatacaaactatatataatcatcaagtaatacaaactaatttagtaatagcctgggttaagtattattagggccctgtgtctgctgtagaaaaaaaaattcacatgatgcacttcaaattcaaataaaaatccttttggcatgttcccatttttgcttagctcaattagtgtggctaaccaagagataactgtaaatgtgacattgatttgctcttactacagcttcagtgattgggggaggaaaagtcccaacccaatgggctcaaacttctaaggggtactcctctcatccccttatccttctccctcgacattttctccctctttcttcccatgaccccaaagccaagggcaacagatcagtaaagaacgtggtcagagtagaacccctgaagtattttttaatcctacctcaaaatttaacagttacctgagagatttaacattatctagttcattgaatcattgtatgtggtcatggataaattgcacaccttggaattcgctttctaaaggaaatcaaatgaatggaggaactttccaaacaccactttacttgtgttatatagccaatataactatctctactgaatgtcattgaaaaactaaaaaattaaacttatttacaaataggtaaatatttgtcattgaatccattgccatcccatttgactgttcttttcatcctactgtctagtaataagctgagtataagatgacagtgtaatctccctgaaagcaggagctactttctttcttttgtaatctatttccatccccatttccctgtcctgtctccctgtattcactcccaagctcagttctgaatagacattcctgctcagagatactcccaactgatgcagaaaccaaataaagaggtaggtattccaagaattcaagaatggacattagtaaagaataaaacatttatttgagcttggaattatttggatcatctatatggcctaaaaatatatggactatgcctgtgtacctgaatacgtatgtagtcaggtcaagacaatcatccaaataacttagacccctaaaagcaaggccaggatttgcaatttaatgtgtcccaattaattcacttgaaaattagtaacactctgtttacgttgcctctggctggagctgcatggtggaagaagcccaactttggatccatgtacttcacccatccaatactcttgggacatttatgtgtattttatctgtatatatgaagccaatgtctatgtctacacagtcaaagtgaaatgcatgtttgatatagctgtacatagatatctattttgcaggtacaaaaatatcctgggggaaaactgggagtggaagggtggggggtgggagtgagggacatgggggagggacaggaagaggagaagtgttggtttgaacgatccaagcaaactctcccagaatcaaattacctgggtagttgttcaacttttcactctgcttagcctgtatagacaaaccccatatatttgtagaggcttggccttggaattctggaataccattggcttttcagtaggctgatgaacacattttgaaaattctattatcttcagaattttgccccattgttaagtgcttaaccgtcactcttgaatgtgcaatgtgctgtggattccattttcatcagttctgaaagaactgcaatgtgtaaattatcagtgaaatgcatgcatataagggctctatcattatcaaattgtaaggacaattgtacccttctatatctttgggcatgctagacacccccatgccttcattgagatcccattttccccctctcaagtggaaaataatcacatccagcaagctctctcattattgagaaataccatttggaaattgccactttttattcctaagcagcacctttcactgttcatgatgctaatgttccacaaaagcatgtgccattggcccactgaaggatagagggacccttttcaatctatatcagctgggctctgggactgaatctctcacctattcttgcagaaagacatactaattaaaccttgtcaaagtaaaaaaaaaaaaaaaaaa

SEQ ID NO: 150 - protein, 503 aa, Homo sapiens; identical to SEQ ID NO: 148

SEQ ID NO: 151 - DNA, 6333 bp, Homo sapiens
gtagtctctttggaaacttctgcaggggaaaagagctaggaaagagctgcaaagcagtgtgggctttttcccttttttgctccttttcattacccctcctccgttttcacccttctccggacttcgcgtagaacctgcgaatttcgaagaggaggtggcaaagtgggagaaaagaggtgttagggtttggggtttttttgtttttgtttttgttttttaatttcttgatttcaacattttctcccaccctctcggctgcagccaacgcctcttacctgttctgcggcgccgcgcaccgctggcagctgagggttagaaagcggggtgtattttagattttaagcaaaaattttaaagataaatccatttttctctcccacccccaacgccatctccactgcatccgatctcattatttcggtggttgcttgggggtgaacaattttgtggctttttttcccctataattctgacccgctcaggcttgagggtttctccggcctccgctcactgcgtgcacctggcgctgccctgcttcccccaacctgttgcaaggctttaattcttgcaactgggacctgctcgcaggcaccccagccctccacctctctctacatttttgcaagtgtctgggggagggcacctgctctacctgccagaaattttaaaacaaaaacaaaaacaaaaaaatctccgggggccctcttggcccctttatccctgcactctcgctctcctgccccaccccgaggtaaagggggcgactaagagaagatggtgttgctcaccgcggtcctcctgctgctggccgcctatgcggggccggcccagagcctgggctccttcgtgcactgcgagccctgcgacgagaaagccctctccatgtgcccccccagccccctgggctgcgagctggtcaaggagccgggctgcggctgctgcatgacctgcgccctggccgaggggcagtcgtgcggcgtctacaccgagcgctgcgcccaggggctgcgctgcctcccccggcaggacgaggagaagccgctgcacgccctgctgcacggccgcggggtttgcctcaacgaaaagagctaccgcgagcaagtcaagatcgagagagactcccgtgagcacgaggagcccaccacctctgagatggccgaggagacctactcccccaagatcttccggcccaaacacacccgcatctccgagctgaaggctgaagcagtgaagaaggaccgcagaaagaagctgacccagtccaagtttgtcgggggagccgagaacactgcccacccccggatcatctctgcacctgagatgagacaggagtctgagcagggcccctgccgcagacacatggaggcttccctgcaggagctcaaagccagcccacgcatggtgccccgtgctgtgtacctgcccaattgtgaccgcaaaggattctacaagagaaagcagtgcaaaccttcccgtggccgcaagcgtggcatctgctggtgcgtggacaagtacgggatgaagctgccaggcatggagtacgttgacggggactttcagtgccacaccttcgacagcagcaacgttgagtgatgcgtccccccccaacctttccctcaccccctcccacccccagccccgactccagccagcgcctccctccaccccaggacgccactcatttcatctcatttaagggaaaaatatatatctatctatttgaggaaactgaggacctcggaatctctagcaagggctcaacttcgaaaatggcaacaacagagatgcaaaaagctaaaaagacaccccccccctttaaatggttttctttttgaggcaagttggatgaacagagaagggaagagaggaagaacgagaggaagagaagggaaggaagtgtttgtgtagaagagagagaaagacgaatagagttaggaaaaggaagacaagcaggtgggcaggaaggacatgcaccgagaccaggcaggggcccaactttcacgtccagccctggcctggggtcgggagaggtgggcgctagaagatgcagcccaggatgtggcaatcaatgacactattggggtttcccaggatggattggtcagggggagaaaggaaaaggcaaaacactccaggacctctcccggatctgtctcctcctctagccagcagtatggacagctggacccctgaacttcctctcctcttacctgggcagagtgttgtctctccccaaatttataaaaactaaaatgcattccattcctctgaaagcaaaacaaattcataattgagtgatattaaatagagaggttttcggaagcagatctgtgaatatgaaatacatgtgcatatttcattccccaggcagacattttttagaaatcaatacatgccccaatattggaaagacttgttcttccacggtgactacagtacatgctgaagcgtgccgtttcagccctcatttaattcaatttgtaagtagcgcagcagcctctgtgggggaggataggctgaaaaaaaaaagtgggctcgtatttatctacaggactccatatagtcatatataggcatataaatctattctttttctttgtttttttctttcttcctttctttcaaaggtttgcattaacttttcaaagtagttcctataggggcattgaggagcttcctcattctgggaaaactgagaaaacccatattctcctaatacaacccgtaatagcatttttgcctgcctcgaggcagagtttcccgtgagcaataaactcagcttttttgtggggcacagtactggatttgacagtgattccccacgtgtgttcatctgcacccaccgagccaggcagaggccagccctccgtggtgcacacagcacgcgcctcagtccatcccattttagtctttaaaccctcaggaagtcacagtctccggacaccacaccacatgagcccaacaggtccacgatggatccaccagtcccaccccagccttttcctttcatctgaacagaatgtgcatttttggaagcctccctcactctccatgctggcagagcaggagggagactgaagtaagagatggcagagggagatggtggcaaaaaggtttagatgcaggagaacagtaagatggatggttccggccagagtcgatgtggggaggaacagagggctgaagggagagggggctgactgttccattctagctttggcacaaagcagcagaaagggggaaaagccaatagaaatttccttagcttccccaccatatgtattttctaggatttgagaggaaagagaggaaaatgggggaatgggttgcaaaatagaaatgagcttaatccaggccgcagagccagggaaggtgagtaactttaggagggtgctagactttagaagccagataggaagaatcagtctaaactggccatgctttggaagggacaagactatgtgctccgctgcccaccttcagcctgcaatgagggactgaggcccacgagtctttccagctcttcctccattctggccagtccctgcatcctccctggggtggaggatggaaggaaagctgggacaagcagggaacgcatgattcagggatgctgtcactcggcagccagattccgaaactcccattctccaatgacttcctcaaccaatgggtggccttgtgactgttctttaaggctgaagatatccaggaaagggggcttggacactggccaaggagaccccttcgtgctgtggacacagctctcttcactctttgctcatggcatgacacagcggagaccgcctccaacaacgaatttggggctacgaagaggaatagcgaaaaagcaaatctgtttcaactgatgggaaccctatagctatagaacttgggggctatctcctatgcccctggacaggacagttggctggggacaggagaagtgctcaatcttcatgagacaaaggggcccgatagggccagcagccacaaggccttgacctgccgagtcagcatgccccatctctctgcacagctgtcccctaaacccaactcacgtttctgtatgtcttaggccagtatcccaaacctcttccacgtcactgttctttccacccattctccctttgcatcttgagcagttatccaactaggatctgccaagtggatactggggtgccactcccctgagaaaagactgagccaggaactacaagctccccccacattcctcccagcctggacctaattcttgagaggggctctctcttcacggactgtgtctggactttgagcaggcttctgccccttgcgttggctctttgctgccagccatcaggtgggggattagagcctggtgtaagtgcgccagactcttccggtttccaaagttcgtgcctgcgaacccaaacctgtgagtctcttctgcatgcaggagtttctcctgggcagctggtcactccccagagaagctgggccttcatggacacatggaactaagcctcccaaatgggagttctggctgagcccagggtggggagatcctgggaagggaggcactggaggaagacggcacctcttcccccatggcagggtgtgagggaggcaggtttggaatggtgcgagtatggcaatctaagcaggggtctggtctctttgactccaggctggcctttggccgactgtctgctcacccagagaccttggactccggactatccatggctccgaatctaagtgctgcccactcccatgctcacacccacagaaggtcttcccatcccctttagattcgtgcctcactccaccagtgaggaagatgcctctgtctttcccacgactgccaggagatagggaagcccagccaggactgaccctccttcctccagcctgccctgacccacctggcaaagcagggcacatggggaggaagagactggaacctttctttgacagccaggcctagacagacaggcctggggacactggccccatgaggggaggaaggcaggcgcacgaggtccagggaggcccttttctgatcatgccccttctctcccaccccatctccccaccaccacctctgtggcctccatggtacccccacagggctggcctcccctagagggtgggcctcaaccacctgctcccgccacgcaccggttagtgagacagggctgccacggcaaccgccaagcccccctcaaggtgggacagtaccccggacccatccactcactcctgagagggctccggcccagaatgggaacctcagagaagagctctaaggagaagaaaccccatagcgtcagagaggatatgtctggcttccaagagaaaggaggctccgttttgcaaagtggaggagggacgagggacaggggtttcaccagccagcaacctgggccttgtactgtctgtgtttttaaaaccactaaagtgcaagaattacattgcactgtttctccactttttattttctcttaggcttttgtttctatttcaaacatactttcttggttttctaatggagtatatagtttagtcatttcacagactctggcctcctctcctgaaatccttttggatggggaaagggaaggtggggagggtccgaggggaaggggaccccagcttccctgtgcccgctcaccccactccaccagtccccggtcgccagccggagtctcctctctaccgccactgtcacaccgtagcccacatggatagcacagttgtcagacaagattccttcagattccgagttgcctaccggttgttttcgttgttgttgttgttgtttttctttttctttttttttttgaagacagcaataaccacagtacatattactgtagttctctatagttttacatacattcataccataactctgttctctcctcttttttgttttcaactttaaaaacaaaaataaacgatgataatctttactggtgaaaaggatggaaaaataaatcaacaaatgcaaccagtttgtgagaaaaaaaaaaaaaagccgaaaaaaaaaaaaaaaacacctgaatgcggaagagctcggctcccgtttagcattttgtacttaaggaaataaaaaaccaacaaaggatctcacattttcttaaaaagtgaagattgctgtatactatttattcaacttataatttatgttactccttgatctttgtcttttgtcatgacaaagcatttatttaataaagttatgcattcagttaaaaaaaaaaaaaaaaaaaaaaaaaaaaaaaaaaaaaaaaaaaaaaaaaaaaaaaaaaaaaaaaaaaaaaaaaaaaaaaaaaaaaaaaaaaaaaa

SEQ ID NO: 152 - protein, 272 aa, Homo sapiens
MVLLTAVLLLLAAYAGPAQSLGSFVHCEPCDEKALSMCPPSPLGCELVKEPGCGCCMTCALAEGQSCGVYTERCAQGLRCLPRQDEEKPLHALLHGRGVCLNEKSYREQVKIERDSREHEEPTTSEMAEETYSPKIFRPKHTRISELKAEAVKKDRRKKLTQSKFVGGAENTAHPRIISAPEMRQESEQGPCRRHMEASLQELKASPRMVPRAVYLPNCDRKGFYKRKQCKPSRGRKRGICWCVDKYGMKLPGMEYVDGDFQCHTFDSSNVE

SEQ ID NO: 153 - DNA, 3978 bp, Homo sapiens
ggcggcggcggcggcggcggccccgggcgctgagcgggtgcccggcgcggagagcggcgagcgcagccatgccccaggccgcctccggggcagcagcagcggcggccggggccgaggcgcgggccgggggcgccggggggccggcggcggcccgggcgggacgatgaagcggcagaacgtgcgcacgctggcgctcatcgtgtgcaccttcacctacctgctggtgggcgccgcggtcttcgacgcgctggagtcggagcccgagctgatcgagcggcagcggctggagctgcggcagcaggagctgcgggcgcgctacaacctcagccagggcggctacgaggagctggagcgcgtcgtgctgcgcctcaagccgcacaaggccggcgtgcagtggcgcttcgccggctccttctacttcgccatcaccgtcatcaccaccatcggctacgggcacgcggcacccagcacggatggcggcaaggtgttctgcatgttctacgcgctgctgggcatcccgctcacgctcgtcatgttccagagcctgggcgagcgcatcaacaccttggtgaggtacctgctgcaccgcgccaagaaggggctgggcatgcggcgcgccgacgtgtccatggccaacatggtgctcatcggcttcttctcgtgcatcagcacgctgtgcatcggcgccgccgccttctcccactacgagcactggaccttcttccaggcctactactactgcttcatcaccctcaccaccatcggcttcggcgactacgtggcgctgcagaaggaccaggccctgcagacgcagccgcagtacgtggccttcagcttcgtctacatccttacgggcctcacggtcatcggcgccttcctcaacctcgtggtgctgcgcttcatgaccatgaacgccgaggacgagaagcgcgacgccgagcaccgcgcgctgctcacgcgcaacgggcaggcgggcggcggcggagggggtggcagcgcgcacactacggacaccgcctcatccacggcggcagcgggcggcggcggcttccgcaacgtctacgcggaggtgctgcacttccagtccatgtgctcgtgcctgtggtacaagagccgcgagaagctgcagtactccatccccatgatcatcccgcgggacctctccacgtccgacacgtgcgtggagcagagccactcgtcgccgggagggggcggccgctacagcgacacgccctcgcgacgctgcctgtgcagcggggcgccacgctccgccatcagctcggtgtccacgggtctgcacagcctgtccaccttccgcggcctcatgaagcgcaggagctccgtgtgactgccccgaggggcctggagcacctgggggcgcgggcgggggacccctgctgggaggccaggagactgcccctgctgccttctgcccagtgggaccccgcacaacatccctcaccactctcccccagcacccccatctccgactgtgcctgcttgcaccagccggcaggaggccgggctctgaggacccctggggcccccatcggagccctgcaaattccgagaaatgtgaaacttggtggggtcagggaggaaaggcagaagctgggagcctcccttccctttgaaaatctaagaagctcccagtcctcagagaccctgctggtacccagacccccaccttcggaggggacttcatgttccgtgtacgtttgcatctctatttatacctctgtcctgctaggtctcccaccttcccttggttccaaaagccagggtgtctatgtccaagtcacccctactcagccccactccccttcctcatccccagctgtgtctcccaacctcccttcgtgttgttttgcatggctttgcagttatggagaaagtggaaacccagcagtccctaaagctggtccccagaaagcaggacagaaagaaggagggacaggcaggcagcaggaggggcgagctgggaggcaggaggcagcggcctgtcagtctgcagaatggtcgcactggaggttcaagctaactggcctccagccacattctcatagcaggtaggacttcagccttccagacactgcccttagaatctggaacagaagacttcagactcaccataattgctgataattacccactcttaaatttgtcgagtgatttttagcctctgaaaactctatgctggccactgattcctttgagtctcacaaaaccctacttaggtcatcagggcaggagttctcactcccattttacagatgagaatactgaggcctggacaggtgaagtgaccagagagcaaaaggcaaaggggtgggggctgggtgcagtggctcacacctgtattcccaacacttttggaggctgaggttggaggattgcttgagcccaggaatttgagaccagcctaggtgacatagtgagaccccatctctacaaaaaataaaaaattaaccaggtgtggtggcacgtgcctgggagtcccagcgacttgggaggctgaggtgggaggattgtttgagcctgggaggtcgaggctgtagtgagccctgattgcaccactgtactccagcctgggtgacagggcaagaccctgtctcaaaaaaaaaaaaaaaaatggcaaagggagacaagagcccagcctgcttgttgctagccaaagtgttctttccttccagcttggcctgctcttaaaagcaaagctcctgcagtgtacatcctggcattgtgtggctacctgggttttaaaccagaatcagaagtcccggatcagagggcactgctgaggttcagcctcttctcttcttggccaggaggcagcagctctgaatgggcccctgaggctgcacaggggcctttgtcactggggcgcatgcttacaaacagtgcagttcttgggaccgaggtaagcagggctgggtctcatggcagaaaggccaggatctggggctctaggaatttgggaattgggcagagtggccaagaaagctggcaggcatatcctatgggacatcacacctggcaccattgtcattgttggtgcctgtgtcccaagtagctagtgataagctgaggctgcagcaagaaacacccttcccaggtgggggagtttggaccagaggtgccctctgcccaccacacctgcaacccagaagcccagatggaacgcagctgacgaaggtgatgcttgaggctcacttttggggccccacagctggagccggtataatgactgggacaacatcaaggggtggatgaggggcctctcctcccgcaacactgccttcccatgctgttcccctgccagctccttaacactgccgaccaaggccagccctggcattcagggaaattggagggcagcacccgtagggtggccagcctcaggccccaccccagctgtgtcctctagtctctggggacccctggggggaagaagtctaccctgcttgtgagtcccgtctcagtgtggaggaactggctgcacgtgggacctgaaggtgccctctgtgtttatgttgggggtgggggggcagtgctggctgcctctgtcctgtgtgtgaccctgccctcgaagggtcctgtcctgtcagtcccgagggagccacaaccaaagctgcggagagaaggtggggaagggtgcagaatggccgtggggcacagcgtggcagactgttcagtctctgctgggtctttcctagggacctggaaggccagtgttgcttccccctcactccctttcactgcaggcagcctctctgcttccccaatgccttatgcctgggcacactgccacagaatatgcaatatgtgtgggtgaccatgccctcacgaccacacccccaccccgggcagcccccggactccaaaggtcgtggctgccacagcctccctcagctcttcctgcctatctgtcttcacactgagaatggcgcccaataaatgctatccacggagaccagg

SEQ ID NO: 154 - protein, 394 aa, Homo sapiens
MKRQNVRTLALIVCTFTYLLVGAAVFDALESEPELIERQRLELRQQELRARYNLSQGGYEELERVVLRLKPHKAGVQWRFAGSFYFAITVITTIGYGHAAPSTDGGKVFCMFYALLGIPLTLVMFQSLGERINTLVRYLLHRAKKGLGMRRADVSMANMVLIGFFSCISTLCIGAAAFSHYEHWTFFQAYYYCFITLTTIGFGDYVALQKDQALQTQPQYVAFSFVYILTGLTVIGAFLNLVVLRFMTMNAEDEKRDAEHRALLTRNGQAGGGGGGGSAHTTDTASSTAAAGGGGFRNVYAEVLHFQSMCSCLWYKSREKLQYSIPMIIPRDLSTSDTCVEQSHSSPGGGGRYSDTPSRRCLCSGAPRSAISSVSTGLHSLSTFRGLMKRRSSV

SEQ ID NO: 155 - DNA, 3085 bp, Homo sapiens
cggagagccgcgcagggcgcgggccgcgcggggtggggcagccggagcgcaggcccccgatccccggcgggcgcccccgggcccccgcgcgcgccccggcctccgggagactggcgcatgccacggagcgcccctcgggccgccgccgctcctgcccgggcccctgctgctgctgctgtcgcctgcgcctgctgccccaactcggcgcccgacttcttcatggtgtgcggaggtcatgttcgctccttagcaggcaaacgacttttctcctcgcctcctcgccccgcatgttcaggaccaaacgatctgcgctcgtccggcgtctctggaggagccgtgcgcccggcggcgaggacgaggaggagggcgcagggggaggtggaggaggaggcgagctgcggggagaaggggcgacggacagccgagcgcatggggccggtggcggcggcccgggcagggctggatgctgcctgggcaaggcggtgcgaggtgccaaaggtcaccaccatccccacccgccagccgcgggcgccggcgcggccgggggcgccgaggcggatctgaaggcgctcacgcactcggtgctcaagaaactgaaggagcggcagctggagctgctgctccaggccgtggagtcccgcggcgggacgcgcaccgcgtgcctcctgctgcccggccgcctggactgcaggctgggcccgggggcgcccgccggcgcgcagcctgcgcagccgccctcgtcctactcgctccccctcctgctgtgcaaagtgttcaggtggccggatctcaggcattcctcggaagtcaagaggctgtgttgctgtgaatcttacgggaagatcaaccccgagctggtgtgctgcaacccccatcaccttagccgactctgcgaactagagtctcccccccctccttactccagatacccgatggattttctcaaaccaactgactgtccagatgctgtgccttcctccgctgaaacagggggaacgaattatctggcccctggggggctttcagattcccaacttcttctggagcctggggatcggtcacactggtgcgtggtggcatactgggaggagaagacgagagtggggaggctctactgtgtccaggagccctctctggatatcttctatgatctacctcaggggaatggcttttgcctcggacagctcaattcggacaacaagagtcagctggtgcagaaggtgcggagcaaaatcggctgcggcatccagctgacgcgggaggtggatggtgtgtgggtgtacaaccgcagcagttaccccatcttcatcaagtccgccacactggacaacccggactccaggacgctgttggtacacaaggtgttccccggtttctccatcaaggctttcgactacgagaaggcgtacagcctgcagcggcccaatgaccacgagtttatgcagcagccgtggacgggctttaccgtgcagatcagctttgtgaagggctggggccagtgctacacccgccagttcatcagcagctgcccgtgctggctagaggtcatcttcaacagccggtagccgcgtgcggaggggacagagcgtgagctgagcaggccacacttcaaactactttgctgctaatattttcctcctgagtgcttgcttttcatgcaaactctttggtcgttttttttttgtttgttggttggttttcttcttctcgtcctcgtttgtgttctgttttgtttcgctctttgagaaatagcttatgaaaagaattgttgggggtttttttggaagaaggggcaggtatgatcggcaggacaccctgataggaagaggggaagcagaaatccaagcaccaccaaacacagtgtatgaaggggggcggtcatcatttcacttgtcaggagtgtgtgtgagtgtgagtgtgcggctgtgtgtgcacgcgtgtgcaggagcggcagatggggagacaacgtgctctttgttttgtgtctcttatggatgtccccagcagagaggtttgcagtcccaagcggtgtctctcctgccccttggacacgctcagtggggcagaggcagtacctgggcaagctggcggctggggtcccagcagctgccaggagcacggctctgtccccagcctgggaaagcccctgcccctcctctccctcatcaaggacacgggcctgtccacaggcttctgagcagcgagcctgctagtggccgaaccagaaccaattattttcatccttgtcttattcccttcctgccagcccctgccattgtagcgtctttcttttttggccatctgctcctggatctccctgagatgggcttcccaagggctgccggggcagccccctcacagtattgctcacccagtgccctctcccctcagcctctcccctgcctgccctggtgacatcaggtttttcccggacttagaaaaccagctcagcactgcctgctcccatcctgtgtgttaagctctgctattaggccagcaagcggggatgtccctgggagggacatgcttagcagtccccttccctccaagaaggatttggtccgtcataacccaaggtaccatcctaggctgacacctaactcttctttcatttcttctacaactcatacactcgtatgatacttcgacactgttcttagctcaatgagcatgtttagactttaacataagctatttttctaactacaaaggtttaaatgaacaagagaagcattctcattggaaatttagcattgtagtgctttgagagagaaaggactcctgaaaaaaaacctgagatttattaaagaaaaaaatgtattttatgttatatataaatatattattacttgtaaatataaagacgttttataagcatcattatttatgtattgtgcaatgtgtataaacaagaaaaataaagaaaagatgcactttgctttaatataaatgcaaataacaaatgccaaattaaaaaagataaacacaagattggtgtttttttctatgggtgttatcacctagctgaatgtttttctaaaggagtttatgttccattaaacgatttttaaaatgtacacttgaa

SEQ ID NO: 156 - protein, 425 aa, Homo sapiens
MFRTKRSALVRRLWRSRAPGGEDEEEGAGGGGGGGELRGEGATDSRAHGAGGGGPGRAGCCLGKAVRGAKGHHHPHPPAAGAGAAGGAEADLKALTHSVLKKLKERQLELLLQAVESRGGTRTACLLLPGRLDCRLGPGAPAGAQPAQPPSSYSLPLLLCKVFRWPDLRHSSEVKRLCCCESYGKINPELVCCNPHHLSRLCELESPPPPYSRYPMDFLKPTDCPDAVPSSAETGGTNYLAPGGLSDSQLLLEPGDRSHWCVVAYWEEKTRVGRLYCVQEPSLDIFYDLPQGNGFCLGQLNSDNKSQLVQKVRSKIGCGIQLTREVDGVWVYNRSSYPIFIKSATLDNPDSRTLLVHKVFPGFSIKAFDYEKAYSLQRPNDHEFMQQPWTGFTVQISFVKGWGQCYTRQFISSCPCWLEVIFNSR

SEQ ID NO: 157 - DNA, 2293 bp, Homo sapiens
agtaaatacggagaatcacgtcgaacaccagtggcccagatactgtcgtggccgcgcacctttggagttttggggcaaagagagttggatggaaggccgaactggagtctcccccccctccttactccagatacccgatggattttctcaaaccaactgcagactgtccagatgctgtgccttcctccgctgaaacagggggaacgaattatctggcccctggggggctttcagattcccaacttcttctggagcctggggatcggtcacactggtgcgtggtggcatactgggaggagaagacgagagtggggaggctctactgtgtccaggagccctctctggatatcttctatgatctacctcaggggaatggcttttgcctcggacagctcaattcggacaacaagagtcagctggtgcagaaggtgcggagcaaaatcggctgcggcatccagctgacgcgggaggtggatggtgtgtgggtgtacaaccgcagcagttaccccatcttcatcaagtccgccacactggacaacccggactccaggacgctgttggtacacaaggtgttccccggtttctccatcaaggctttcgactacgagaaggcgtacagcctgcagcggcccaatgaccacgagtttatgcagcagccgtggacgggctttaccgtgcagatcagctttgtgaagggctggggccagtgctacacccgccagttcatcagcagctgcccgtgctggctagaggtcatcttcaacagccggtagccgcgtgcggaggggacagagcgtgagctgagcaggccacacttcaaactactttgctgctaatattttcctcctgagtgcttgcttttcatgcaaactctttggtcgttttttttttgtttgttggttggttttcttcttctcgtcctcgtttgtgttctgttttgtttcgctctttgagaaatagcttatgaaaagaattgttgggggtttttttggaagaaggggcaggtatgatcggcaggacaccctgataggaagaggggaagcagaaatccaagcaccaccaaacacagtgtatgaaggggggcggtcatcatttcacttgtcaggagtgtgtgtgagtgtgagtgtgcggctgtgtgtgcacgcgtgtgcaggagcggcagatggggagacaacgtgctctttgttttgtgtctcttatggatgtccccagcagagaggtttgcagtcccaagcggtgtctctcctgccccttggacacgctcagtggggcagaggcagtacctgggcaagctggcggctggggtcccagcagctgccaggagcacggctctgtccccagcctgggaaagcccctgcccctcctctccctcatcaaggacacgggcctgtccacaggcttctgagcagcgagcctgctagtggccgaaccagaaccaattattttcatccttgtcttattcccttcctgccagcccctgccattgtagcgtctttcttttttggccatctgctcctggatctccctgagatgggcttcccaagggctgccggggcagccccctcacagtattgctcacccagtgccctctcccctcagcctctcccctgcctgccctggtgacatcaggtttttcccggacttagaaaaccagctcagcactgcctgctcccatcctgtgtgttaagctctgctattaggccagcaagcggggatgtccctgggagggacatgcttagcagtccccttccctccaagaaggatttggtccgtcataacccaaggtaccatcctaggctgacacctaactcttctttcatttcttctacaactcatacactcgtatgatacttcgacactgttcttagctcaatgagcatgtttagactttaacataagctatttttctaactacaaaggtttaaatgaacaagagaagcattctcattggaaatttagcattgtagtgctttgagagagaaaggactcctgaaaaaaaacctgagatttattaaagaaaaaaatgtattttatgttatatataaatatattattacttgtaaatataaagacgttttataagcatcattatttatgtattgtgcaatgtgtataaacaagaaaaataaagaaaagatgcactttgctttaatataaatgcaaataacaaatgccaaattaaaaaagataaacacaagattggtgtttttttctatgggtgttatcacctagctgaatgtttttctaaaggagtttatgttccattaaacgatttttaaaatgtacacttgaa

SEQ ID NO: 158 - protein, 211 aa, Homo sapiens
MDFLKPTADCPDAVPSSAETGGTNYLAPGGLSDSQLLLEPGDRSHWCVVAYWEEKTRVGRLYCVQEPSLDIFYDLPQGNGFCLGQLNSDNKSQLVQKVRSKIGCGIQLTREVDGVWVYNRSSYPIFIKSATLDNPDSRTLLVHKVFPGFSIKAFDYEKAYSLQRPNDHEFMQQPWTGFTVQISFVKGWGQCYTRQFISSCPCWLEVIFNSR

SEQ ID NO: 159 - DNA, 2386 bp, Homo sapiens
agtctcattgagcctgactcgagtaatgattaactggctgcccggagcccagacgggtgacaaggtgctgtggtctgtcttacgatgggcagtgaagcctgagcagaccattaataatcagcatcaaggccgcgagtcagccttttggaatgtgtggtttgtctttcatgctgtttagagcgtgcttaaagatggatcttggtgtttttatttgtgtatttatttctttctctccccttttcaaatccacagcagactgtccagatgctgtgccttcctccgctgaaacagggggaacgaattatctggcccctggggggctttcagattcccaacttcttctggagcctggggatcggtcacactggtgcgtggtggcatactgggaggagaagacgagagtggggaggctctactgtgtccaggagccctctctggatatcttctatgatctacctcaggggaatggcttttgcctcggacagctcaattcggacaacaagagtcagctggtgcagaaggtgcggagcaaaatcggctgcggcatccagctgacgcgggaggtggatggtgtgtgggtgtacaaccgcagcagttaccccatcttcatcaagtccgccacactggacaacccggactccaggacgctgttggtacacaaggtgttccccggtttctccatcaaggctttcgactacgagaaggcgtacagcctgcagcggcccaatgaccacgagtttatgcagcagccgtggacgggctttaccgtgcagatcagctttgtgaagggctggggccagtgctacacccgccagttcatcagcagctgcccgtgctggctagaggtcatcttcaacagccggtagccgcgtgcggaggggacagagcgtgagctgagcaggccacacttcaaactactttgctgctaatattttcctcctgagtgcttgcttttcatgcaaactctttggtcgttttttttttgtttgttggttggttttcttcttctcgtcctcgtttgtgttctgttttgtttcgctctttgagaaatagcttatgaaaagaattgttgggggtttttttggaagaaggggcaggtatgatcggcaggacaccctgataggaagaggggaagcagaaatccaagcaccaccaaacacagtgtatgaaggggggcggtcatcatttcacttgtcaggagtgtgtgtgagtgtgagtgtgcggctgtgtgtgcacgcgtgtgcaggagcggcagatggggagacaacgtgctctttgttttgtgtctcttatggatgtccccagcagagaggtttgcagtcccaagcggtgtctctcctgccccttggacacgctcagtggggcagaggcagtacctgggcaagctggcggctggggtcccagcagctgccaggagcacggctctgtccccagcctgggaaagcccctgcccctcctctccctcatcaaggacacgggcctgtccacaggcttctgagcagcgagcctgctagtggccgaaccagaaccaattattttcatccttgtcttattcccttcctgccagcccctgccattgtagcgtctttcttttttggccatctgctcctggatctccctgagatgggcttcccaagggctgccggggcagccccctcacagtattgctcacccagtgccctctcccctcagcctctcccctgcctgccctggtgacatcaggtttttcccggacttagaaaaccagctcagcactgcctgctcccatcctgtgtgttaagctctgctattaggccagcaagcggggatgtccctgggagggacatgcttagcagtccccttccctccaagaaggatttggtccgtcataacccaaggtaccatcctaggctgacacctaactcttctttcatttcttctacaactcatacactcgtatgatacttcgacactgttcttagctcaatgagcatgtttagactttaacataagctatttttctaactacaaaggtttaaatgaacaagagaagcattctcattggaaatttagcattgtagtgctttgagagagaaaggactcctgaaaaaaaacctgagatttattaaagaaaaaaatgtattttatgttatatataaatatattattacttgtaaatataaagacgttttataagcatcattatttatgtattgtgcaatgtgtataaacaagaaaaataaagaaaagatgcactttgctttaatataaatgcaaataacaaatgccaaattaaaaaagataaacacaagattggtgtttttttctatgggtgttatcacctagctgaatgtttttctaaaggagtttatgttccattaaacgatttttaaaatgtacacttgaa

SEQ ID NO: 160 - protein, 238 aa, Homo sapiens
MCGLSFMLFRACLKMDLGVFICVFISFSPLFKSTADCPDAVPSSAETGGTNYLAPGGLSDSQLLLEPGDRSHWCVVAYWEEKTRVGRLYCVQEPSLDIFYDLPQGNGFCLGQLNSDNKSQLVQKVRSKIGCGIQLTREVDGVWVYNRSSYPIFIKSATLDNPDSRTLLVHKVFPGFSIKAFDYEKAYSLQRPNDHEFMQQPWTGFTVQISFVKGWGQCYTRQFISSCPCWLEVIFNSR

SEQ ID NO: 161 - DNA, 3088 bp, Homo sapiens
cggagagccgcgcagggcgcgggccgcgcggggtggggcagccggagcgcaggcccccgatccccggcgggcgcccccgggcccccgcgcgcgccccggcctccgggagactggcgcatgccacggagcgcccctcgggccgccgccgctcctgcccgggcccctgctgctgctgctgtcgcctgcgcctgctgccccaactcggcgcccgacttcttcatggtgtgcggaggtcatgttcgctccttagcaggcaaacgacttttctcctcgcctcctcgccccgcatgttcaggaccaaacgatctgcgctcgtccggcgtctctggaggagccgtgcgcccggcggcgaggacgaggaggagggcgcagggggaggtggaggaggaggcgagctgcggggagaaggggcgacggacagccgagcgcatggggccggtggcggcggcccgggcagggctggatgctgcctgggcaaggcggtgcgaggtgccaaaggtcaccaccatccccacccgccagccgcgggcgccggcgcggccgggggcgccgaggcggatctgaaggcgctcacgcactcggtgctcaagaaactgaaggagcggcagctggagctgctgctccaggccgtggagtcccgcggcgggacgcgcaccgcgtgcctcctgctgcccggccgcctggactgcaggctgggcccgggggcgcccgccggcgcgcagcctgcgcagccgccctcgtcctactcgctccccctcctgctgtgcaaagtgttcaggtggccggatctcaggcattcctcggaagtcaagaggctgtgttgctgtgaatcttacgggaagatcaaccccgagctggtgtgctgcaacccccatcaccttagccgactctgcgaactagagtctcccccccctccttactccagatacccgatggattttctcaaaccaactgcagactgtccagatgctgtgccttcctccgctgaaacagggggaacgaattatctggcccctggggggctttcagattcccaacttcttctggagcctggggatcggtcacactggtgcgtggtggcatactgggaggagaagacgagagtggggaggctctactgtgtccaggagccctctctggatatcttctatgatctacctcaggggaatggcttttgcctcggacagctcaattcggacaacaagagtcagctggtgcagaaggtgcggagcaaaatcggctgcggcatccagctgacgcgggaggtggatggtgtgtgggtgtacaaccgcagcagttaccccatcttcatcaagtccgccacactggacaacccggactccaggacgctgttggtacacaaggtgttccccggtttctccatcaaggctttcgactacgagaaggcgtacagcctgcagcggcccaatgaccacgagtttatgcagcagccgtggacgggctttaccgtgcagatcagctttgtgaagggctggggccagtgctacacccgccagttcatcagcagctgcccgtgctggctagaggtcatcttcaacagccggtagccgcgtgcggaggggacagagcgtgagctgagcaggccacacttcaaactactttgctgctaatattttcctcctgagtgcttgcttttcatgcaaactctttggtcgttttttttttgtttgttggttggttttcttcttctcgtcctcgtttgtgttctgttttgtttcgctctttgagaaatagcttatgaaaagaattgttgggggtttttttggaagaaggggcaggtatgatcggcaggacaccctgataggaagaggggaagcagaaatccaagcaccaccaaacacagtgtatgaaggggggcggtcatcatttcacttgtcaggagtgtgtgtgagtgtgagtgtgcggctgtgtgtgcacgcgtgtgcaggagcggcagatggggagacaacgtgctctttgttttgtgtctcttatggatgtccccagcagagaggtttgcagtcccaagcggtgtctctcctgccccttggacacgctcagtggggcagaggcagtacctgggcaagctggcggctggggtcccagcagctgccaggagcacggctctgtccccagcctgggaaagcccctgcccctcctctccctcatcaaggacacgggcctgtccacaggcttctgagcagcgagcctgctagtggccgaaccagaaccaattattttcatccttgtcttattcccttcctgccagcccctgccattgtagcgtctttcttttttggccatctgctcctggatctccctgagatgggcttcccaagggctgccggggcagccccctcacagtattgctcacccagtgccctctcccctcagcctctcccctgcctgccctggtgacatcaggtttttcccggacttagaaaaccagctcagcactgcctgctcccatcctgtgtgttaagctctgctattaggccagcaagcggggatgtccctgggagggacatgcttagcagtccccttccctccaagaaggatttggtccgtcataacccaaggtaccatcctaggctgacacctaactcttctttcatttcttctacaactcatacactcgtatgatacttcgacactgttcttagctcaatgagcatgtttagactttaacataagctatttttctaactacaaaggtttaaatgaacaagagaagcattctcattggaaatttagcattgtagtgctttgagagagaaaggactcctgaaaaaaaacctgagatttattaaagaaaaaaatgtattttatgttatatataaatatattattacttgtaaatataaagacgttttataagcatcattatttatgtattgtgcaatgtgtataaacaagaaaaataaagaaaagatgcactttgctttaatataaatgcaaataacaaatgccaaattaaaaaagataaacacaagattggtgtttttttctatgggtgttatcacctagctgaatgtttttctaaaggagtttatgttccattaaacgatttttaaaatgtacacttgaa

SEQ ID NO: 162 - protein, 426 aa, Homo sapiens
MFRTKRSALVRRLWRSRAPGGEDEEEGAGGGGGGGELRGEGATDSRAHGAGGGGPGRAGCCLGKAVRGAKGHHHPHPPAAGAGAAGGAEADLKALTHSVLKKLKERQLELLLQAVESRGGTRTACLLLPGRLDCRLGPGAPAGAQPAQPPSSYSLPLLLCKVFRWPDLRHSSEVKRLCCCESYGKINPELVCCNPHHLSRLCELESPPPPYSRYPMDFLKPTADCPDAVPSSAETGGTNYLAPGGLSDSQLLLEPGDRSHWCVVAYWEEKTRVGRLYCVQEPSLDIFYDLPQGNGFCLGQLNSDNKSQLVQKVRSKIGCGIQLTREVDGVWVYNRSSYPIFIKSATLDNPDSRTLLVHKVFPGFSIKAFDYEKAYSLQRPNDHEFMQQPWTGFTVQISFVKGWGQCYTRQFISSCPCWLEVIFNSR

SEQ ID NO: 163 - DNA, 3918 bp, Homo sapiens
tttttcacccgcgctctccccccttactccctcagcctcccacccgggatggagccatgtgcggcgtggagtccccgcggtgggagagagaatgtaatggacatcggtctgaccaacgagaagcccaacccggaactctcttactccggctccttccagccagcccccggcaacaagaccgtgacctacttgggaaagttcgccttcgactccccttccaactggtgccaggacaacatcattagcctcatgagcgccggcatcttgggggtgcccccggcttcaggggcgctcagcacgcagacgtccacggccagcatggtgcagccaccgcagggtgacgtggaggccatgtatcccgcgctacccccctactccaactgcggcgacctctactcagagcccgtgtctttccacgacccccagggcaatcccgggctcgcctattccccccaggattaccaatcggccaagccggcgttggacagcaatctcttccccatgattcctgactacaacctctaccaccaccccaacgacatgggctccattccggagcacaagcccttccagggcatggaccccatccgggtcaacccgccccctattacccctctggagaccatcaaggcattcaaagacaagcagatccacccgggctttggcagcctgccccagccgccgctcaccctcaagcccatccggccccgcaagtaccccaaccggcctagcaagacaccgctccacgaacggccccacgcgtgcccggccgagggctgcgaccgccgtttcagccgttcggacgagctgacccggcacctgcgcatccacacgggccacaagcccttccagtgccggatctgcatgcggagcttcagccgcagcgaccacctcaccactcacatccgcactcatacgggcgagaagccctttgcctgcgagttctgcgggcgcaagtttgcgcgcagcgacgagcgcaagcgccacgccaagatccacctcaagcaaaaggagaagaaggcggagaagggcggtgcaccctctgcatcctcggcgccccccgtgtcgctggcccccgtggtcaccacctgcgcctgaggatcgggcccccagatccccacttttcccctccagtgcctcccggctgctagcctgaaagcagcgggaaagccagccacggaggcgtaggggccgcgccctggcctctccatggacgtgcggccccttgcttccccttcgatgcccccggttcccaacctttcacgccggccagcggtcaggggccagggctggaggcgccttcccctcgcggtcccccacttagccaaggcgtgggggcggaaaggtggcgtctagcccgctttgttcagttcggatcgccttgatccaggggccgccgggccgcgccaaggacctgcaagggactgaaggcggagcccatccaaccctcgcccgacccaaacacctcattgtttcccccacgtctccctctataccccctcgaagactcgagagggggagggggtaaggagcgcaccaaagcgcagagcttgctgcccgccgcacgcacgcgcgcctgcgtgcggggatgcgcgcgagtgtgtgcgtgctcgcgtgtgtgtgtatgtgtgtgtgtgagtgtgtgtgtgtgcgcgcgcgcaagcgtgtgtgtttaagactcttgagctgaactgggctgtgtttaccccaaactcttccccacctcgggtccccaagccgctgggagatgtcccatgctgggggtccgcacgtggctggaggaggtggtcttccatccgctctgaaatcatgtttcttagagaaatgcctcggatgccgccgacgcggtgctgctgccgccgcttcgggtttggcccctcagaacccctccttttctgagcgcttccctcttaggcctcagggcagtttgatctgtggggagaaagagcagccatcgctgagcctgccttttaaaatatatgtgtatttccttagccccactctaagaaatctatgttcctgagtttgccccctgccctcccactccttccccttctcccctctaaaccttctcccatctctttcaaaatcttttcccagaaaggcaggcttcaaccagccactccagctttgtgtcttctctcaattacatagcaatttctccttcccaccatcatggggaagctggctctgcttttgccctttgtcatcaccaacacaacagatagaatttaaatataagtatatggtgtgcgtgtgtatgtatgtgtatgtatatgcatgcatgtgtataaagatgcacatgcgtacatatacataacatacacacaatatgtattcctagcaaaataaaatctctaaggtacttggttatccagtgcagtgcaccggaataaagagaatttgtaggcgtatacagctttaaatgatttattttttatgaaaatgttaactgatgagattatatctacatacgtgtgttatgtgtgtggatatagatgcacacatatctgtacatatacatgtgagtgtacatatatacacatatacacatctatgtatggatatgtgtgtatacacatatacacatctctgtccaaaatttcctcaaagatatggggattttttcatgaatccatgtggatgaatgaggtgtctcctttccatacccagtctcaccttctccccaccctacctcacctcttctcaggcacccctcttccccagctgtcctgccagcccttctcgtacagggtggctcctttgaagtggagtaatagggaaggttgctctctgccacagcttgcagcatggtcttgactgaatgtactgttcctgttagcgttacttctcctgtggtcagtaagttgcccagagagaaggaacaaaggtctggagtttacagaatgtctgtttttaaagtcactttatgcgttttccacttttttcttttttaagaaaaagaagtaccatttttgttttgttttgttttgatttttggtggtggataaataatactaaaaggactctagtggaaaggggggatatcgaagagcagggggttgtgaatttccaggtacttggactttttgtagaaggagagagaagaagatgaagtttgccaggagggcccatattttttcagctgaagggtaaaatctttctttgcagagacagtattttgctgaatactttttataatgtgatgattattaaaaaagcaaaaattttggtcacttccaagctagaaggaggaatcagataccctttaatattttttcctcgctccttctggtatatgcatgtcactgcatgataattgagttttcctttgttttaataaaactgttctcagacattaagctaaactaagagaaaaataactttgttgccaaaaggttgtgctatccagattttttatatgtctgcatgtttaaaaaaaaaaagcaacaaaagaaaatgcactctaacttatgtgaactgagagaaaaaaatcaggttttaaacaggaaaacctatggggaatgatattttttgaaagacttttgtataaagttgagtacttagaaaaaagacaaaccagatgtaatatattttgtggatgtttttatttcttggatttatagtaccttatactaaggttaaaaaaatatgcttgatattgtgaaaaggtgaaattcttcaccaacatttcatttgctcctttgtcatattgtaatgccaatataatatagttaatgaaaacagcatttttaaaaaccgaaatattgaaatggtgtaatgttgtaccatttgcactgtgagcaaatgctaatacagtaaatatattgtgtttgctgacaatcagccggcctataaatctccttattttatttcttgtttttatagcataaagctttagtttggcctgaaaaaaaa

SEQ ID NO: 164 - protein, 349 aa, Homo sapiens
MEPCAAWSPRGGRENVMDIGLTNEKPNPELSYSGSFQPAPGNKTVTYLGKFAFDSPSNWCQDNIISLMSAGILGVPPASGALSTQTSTASMVQPPQGDVEAMYPALPPYSNCGDLYSEPVSFHDPQGNPGLAYSPQDYQSAKPALDSNLFPMIPDYNLYHHPNDMGSIPEHKPFQGMDPIRVNPPPITPLETIKAFKDKQIHPGFGSLPQPPLTLKPIRPRKYPNRPSKTPLHERPHACPAEGCDRRFSRSDELTRHLRIHTGHKPFQCRICMRSFSRSDHLTTHIRTHTGEKPFACEFCGRKFARSDERKRHAKIHLKQKEKKAEKGGAPSASSAPPVSLAPVVTTCA

SEQ ID NO: 165 - DNA, 3912 bp, Homo sapiens
ctcgatcgagaaggctaggttggcgacgccacggtagaggcttcggttctcccgggtgggggcagccgccgaccggagggagagaatgtaatggacatcggtctgaccaacgagaagcccaacccggaactctcttactccggctccttccagccagcccccggcaacaagaccgtgacctacttgggaaagttcgccttcgactccccttccaactggtgccaggacaacatcattagcctcatgagcgccggcatcttgggggtgcccccggcttcaggggcgctcagcacgcagacgtccacggccagcatggtgcagccaccgcagggtgacgtggaggccatgtatcccgcgctacccccctactccaactgcggcgacctctactcagagcccgtgtctttccacgacccccagggcaatcccgggctcgcctattccccccaggattaccaatcggccaagccggcgttggacagcaatctcttccccatgattcctgactacaacctctaccaccaccccaacgacatgggctccattccggagcacaagcccttccagggcatggaccccatccgggtcaacccgccccctattacccctctggagaccatcaaggcattcaaagacaagcagatccacccgggctttggcagcctgccccagccgccgctcaccctcaagcccatccggccccgcaagtaccccaaccggcctagcaagacaccgctccacgaacggccccacgcgtgcccggccgagggctgcgaccgccgtttcagccgttcggacgagctgacccggcacctgcgcatccacacgggccacaagcccttccagtgccggatctgcatgcggagcttcagccgcagcgaccacctcaccactcacatccgcactcatacgggcgagaagccctttgcctgcgagttctgcgggcgcaagtttgcgcgcagcgacgagcgcaagcgccacgccaagatccacctcaagcaaaaggagaagaaggcggagaagggcggtgcaccctctgcatcctcggcgccccccgtgtcgctggcccccgtggtcaccacctgcgcctgaggatcgggcccccagatccccacttttcccctccagtgcctcccggctgctagcctgaaagcagcgggaaagccagccacggaggcgtaggggccgcgccctggcctctccatggacgtgcggccccttgcttccccttcgatgcccccggttcccaacctttcacgccggccagcggtcaggggccagggctggaggcgccttcccctcgcggtcccccacttagccaaggcgtgggggcggaaaggtggcgtctagcccgctttgttcagttcggatcgccttgatccaggggccgccgggccgcgccaaggacctgcaagggactgaaggcggagcccatccaaccctcgcccgacccaaacacctcattgtttcccccacgtctccctctataccccctcgaagactcgagagggggagggggtaaggagcgcaccaaagcgcagagcttgctgcccgccgcacgcacgcgcgcctgcgtgcggggatgcgcgcgagtgtgtgcgtgctcgcgtgtgtgtgtatgtgtgtgtgtgagtgtgtgtgtgtgcgcgcgcgcaagcgtgtgtgtttaagactcttgagctgaactgggctgtgtttaccccaaactcttccccacctcgggtccccaagccgctgggagatgtcccatgctgggggtccgcacgtggctggaggaggtggtcttccatccgctctgaaatcatgtttcttagagaaatgcctcggatgccgccgacgcggtgctgctgccgccgcttcgggtttggcccctcagaacccctccttttctgagcgcttccctcttaggcctcagggcagtttgatctgtggggagaaagagcagccatcgctgagcctgccttttaaaatatatgtgtatttccttagccccactctaagaaatctatgttcctgagtttgccccctgccctcccactccttccccttctcccctctaaaccttctcccatctctttcaaaatcttttcccagaaaggcaggcttcaaccagccactccagctttgtgtcttctctcaattacatagcaatttctccttcccaccatcatggggaagctggctctgcttttgccctttgtcatcaccaacacaacagatagaatttaaatataagtatatggtgtgcgtgtgtatgtatgtgtatgtatatgcatgcatgtgtataaagatgcacatgcgtacatatacataacatacacacaatatgtattcctagcaaaataaaatctctaaggtacttggttatccagtgcagtgcaccggaataaagagaatttgtaggcgtatacagctttaaatgatttattttttatgaaaatgttaactgatgagattatatctacatacgtgtgttatgtgtgtggatatagatgcacacatatctgtacatatacatgtgagtgtacatatatacacatatacacatctatgtatggatatgtgtgtatacacatatacacatctctgtccaaaatttcctcaaagatatggggattttttcatgaatccatgtggatgaatgaggtgtctcctttccatacccagtctcaccttctccccaccctacctcacctcttctcaggcacccctcttccccagctgtcctgccagcccttctcgtacagggtggctcctttgaagtggagtaatagggaaggttgctctctgccacagcttgcagcatggtcttgactgaatgtactgttcctgttagcgttacttctcctgtggtcagtaagttgcccagagagaaggaacaaaggtctggagtttacagaatgtctgtttttaaagtcactttatgcgttttccacttttttcttttttaagaaaaagaagtaccatttttgttttgttttgttttgatttttggtggtggataaataatactaaaaggactctagtggaaaggggggatatcgaagagcagggggttgtgaatttccaggtacttggactttttgtagaaggagagagaagaagatgaagtttgccaggagggcccatattttttcagctgaagggtaaaatctttctttgcagagacagtattttgctgaatactttttataatgtgatgattattaaaaaagcaaaaattttggtcacttccaagctagaaggaggaatcagataccctttaatattttttcctcgctccttctggtatatgcatgtcactgcatgataattgagttttcctttgttttaataaaactgttctcagacattaagctaaactaagagaaaaataactttgttgccaaaaggttgtgctatccagattttttatatgtctgcatgtttaaaaaaaaaaagcaacaaaagaaaatgcactctaacttatgtgaactgagagaaaaaaatcaggttttaaacaggaaaacctatggggaatgatattttttgaaagacttttgtataaagttgagtacttagaaaaaagacaaaccagatgtaatatattttgtggatgtttttatttcttggatttatagtaccttatactaaggttaaaaaaatatgcttgatattgtgaaaaggtgaaattcttcaccaacatttcatttgctcctttgtcatattgtaatgccaatataatatagttaatgaaaacagcatttttaaaaaccgaaatattgaaatggtgtaatgttgtaccatttgcactgtgagcaaatgctaatacagtaaatatattgtgtttgctgacaatcagccggcctataaatctccttattttatttcttgtttttatagcataaagctttagtttggcctgaaaaaaaa

SEQ ID NO: 166 - protein, 333 aa, Homo sapiens
MDIGLTNEKPNPELSYSGSFQPAPGNKTVTYLGKFAFDSPSNWCQDNIISLMSAGILGVPPASGALSTQTSTASMVQPPQGDVEAMYPALPPYSNCGDLYSEPVSFHDPQGNPGLAYSPQDYQSAKPALDSNLFPMIPDYNLYHHPNDMGSIPEHKPFQGMDPIRVNPPPITPLETIKAFKDKQIHPGFGSLPQPPLTLKPIRPRKYPNRPSKTPLHERPHACPAEGCDRRFSRSDELTRHLRIHTGHKPFQCRICMRSFSRSDHLTTHIRTHTGEKPFACEFCGRKFARSDERKRHAKIHLKQKEKKAEKGGAPSASSAPPVSLAPVVTTCA

SEQ ID NO: 167 - DNA, 4342 bp, Homo sapiens
gatcaatactgaggccgcgtccgacccccttgagccgagatccccccccagcccagcccccaccccaccccccgcacacgccccaccccccccacgacccagcctcataccgcaccagctgaggcacccaagaggattaccccctggggccctctcccgccccccaaaaaagagaagatcccctctcctggcccatcccttcccttcttccctcccccctccccccgaactttccctctcgcatgcttttcccctgcaccacggatcgcctctcggatgccgcttgcctggaagctgcgttaggagcgagcggcggcggtggcggcggtggcggcggcggcggcagctcgggagtgctatgaccggcaaactcgccgagaagctgccggtgaccatgagcagtttgctaaaccaactgcctgacaatctgtaccccgaggagatccccagcgcgctcaacctcttctccggcagcagcgactcggtagtccattacaatcagatggctacagagaatgtaatggacatcggtctgaccaacgagaagcccaacccggaactctcttactccggctccttccagccagcccccggcaacaagaccgtgacctacttgggaaagttcgccttcgactccccttccaactggtgccaggacaacatcattagcctcatgagcgccggcatcttgggggtgcccccggcttcaggggcgctcagcacgcagacgtccacggccagcatggtgcagccaccgcagggtgacgtggaggccatgtatcccgcgctacccccctactccaactgcggcgacctctactcagagcccgtgtctttccacgacccccagggcaatcccgggctcgcctattccccccaggattaccaatcggccaagccggcgttggacagcaatctcttccccatgattcctgactacaacctctaccaccaccccaacgacatgggctccattccggagcacaagcccttccagggcatggaccccatccgggtcaacccgccccctattacccctctggagaccatcaaggcattcaaagacaagcagatccacccgggctttggcagcctgccccagccgccgctcaccctcaagcccatccggccccgcaagtaccccaaccggcctagcaagacaccgctccacgaacggccccacgcgtgcccggccgagggctgcgaccgccgtttcagccgttcggacgagctgacccggcacctgcgcatccacacgggccacaagcccttccagtgccggatctgcatgcggagcttcagccgcagcgaccacctcaccactcacatccgcactcatacgggcgagaagccctttgcctgcgagttctgcgggcgcaagtttgcgcgcagcgacgagcgcaagcgccacgccaagatccacctcaagcaaaaggagaagaaggcggagaagggcggtgcaccctctgcatcctcggcgccccccgtgtcgctggcccccgtggtcaccacctgcgcctgaggatcgggcccccagatccccacttttcccctccagtgcctcccggctgctagcctgaaagcagcgggaaagccagccacggaggcgtaggggccgcgccctggcctctccatggacgtgcggccccttgcttccccttcgatgcccccggttcccaacctttcacgccggccagcggtcaggggccagggctggaggcgccttcccctcgcggtcccccacttagccaaggcgtgggggcggaaaggtggcgtctagcccgctttgttcagttcggatcgccttgatccaggggccgccgggccgcgccaaggacctgcaagggactgaaggcggagcccatccaaccctcgcccgacccaaacacctcattgtttcccccacgtctccctctataccccctcgaagactcgagagggggagggggtaaggagcgcaccaaagcgcagagcttgctgcccgccgcacgcacgcgcgcctgcgtgcggggatgcgcgcgagtgtgtgcgtgctcgcgtgtgtgtgtatgtgtgtgtgtgagtgtgtgtgtgtgcgcgcgcgcaagcgtgtgtgtttaagactcttgagctgaactgggctgtgtttaccccaaactcttccccacctcgggtccccaagccgctgggagatgtcccatgctgggggtccgcacgtggctggaggaggtggtcttccatccgctctgaaatcatgtttcttagagaaatgcctcggatgccgccgacgcggtgctgctgccgccgcttcgggtttggcccctcagaacccctccttttctgagcgcttccctcttaggcctcagggcagtttgatctgtggggagaaagagcagccatcgctgagcctgccttttaaaatatatgtgtatttccttagccccactctaagaaatctatgttcctgagtttgccccctgccctcccactccttccccttctcccctctaaaccttctcccatctctttcaaaatcttttcccagaaaggcaggcttcaaccagccactccagctttgtgtcttctctcaattacatagcaatttctccttcccaccatcatggggaagctggctctgcttttgccctttgtcatcaccaacacaacagatagaatttaaatataagtatatggtgtgcgtgtgtatgtatgtgtatgtatatgcatgcatgtgtataaagatgcacatgcgtacatatacataacatacacacaatatgtattcctagcaaaataaaatctctaaggtacttggttatccagtgcagtgcaccggaataaagagaatttgtaggcgtatacagctttaaatgatttattttttatgaaaatgttaactgatgagattatatctacatacgtgtgttatgtgtgtggatatagatgcacacatatctgtacatatacatgtgagtgtacatatatacacatatacacatctatgtatggatatgtgtgtatacacatatacacatctctgtccaaaatttcctcaaagatatggggattttttcatgaatccatgtggatgaatgaggtgtctcctttccatacccagtctcaccttctccccaccctacctcacctcttctcaggcacccctcttccccagctgtcctgccagcccttctcgtacagggtggctcctttgaagtggagtaatagggaaggttgctctctgccacagcttgcagcatggtcttgactgaatgtactgttcctgttagcgttacttctcctgtggtcagtaagttgcccagagagaaggaacaaaggtctggagtttacagaatgtctgtttttaaagtcactttatgcgttttccacttttttcttttttaagaaaaagaagtaccatttttgttttgttttgttttgatttttggtggtggataaataatactaaaaggactctagtggaaaggggggatatcgaagagcagggggttgtgaatttccaggtacttggactttttgtagaaggagagagaagaagatgaagtttgccaggagggcccatattttttcagctgaagggtaaaatctttctttgcagagacagtattttgctgaatactttttataatgtgatgattattaaaaaagcaaaaattttggtcacttccaagctagaaggaggaatcagataccctttaatattttttcctcgctccttctggtatatgcatgtcactgcatgataattgagttttcctttgttttaataaaactgttctcagacattaagctaaactaagagaaaaataactttgttgccaaaaggttgtgctatccagattttttatatgtctgcatgtttaaaaaaaaaaagcaacaaaagaaaatgcactctaacttatgtgaactgagagaaaaaaatcaggttttaaacaggaaaacctatggggaatgatattttttgaaagacttttgtataaagttgagtacttagaaaaaagacaaaccagatgtaatatattttgtggatgtttttatttcttggatttatagtaccttatactaaggttaaaaaaatatgcttgatattgtgaaaaggtgaaattcttcaccaacatttcatttgctcctttgtcatattgtaatgccaatataatatagttaatgaaaacagcatttttaaaaaccgaaatattgaaatggtgtaatgttgtaccatttgcactgtgagcaaatgctaatacagtaaatatattgtgtttgctgacaatcagccggcctataaatctccttattttatttcttgtttttatagcataaagctttagtttggcctgaaaaaaaa

SEQ ID NO: 168 - protein, 387 aa, Homo sapiens
MTGKLAEKLPVTMSSLLNQLPDNLYPEEIPSALNLFSGSSDSVVHYNQMATENVMDIGLTNEKPNPELSYSGSFQPAPGNKTVTYLGKFAFDSPSNWCQDNIISLMSAGILGVPPASGALSTQTSTASMVQPPQGDVEAMYPALPPYSNCGDLYSEPVSFHDPQGNPGLAYSPQDYQSAKPALDSNLFPMIPDYNLYHHPNDMGSIPEHKPFQGMDPIRVNPPPITPLETIKAFKDKQIHPGFGSLPQPPLTLKPIRPRKYPNRPSKTPLHERPHACPAEGCDRRFSRSDELTRHLRIHTGHKPFQCRICMRSFSRSDHLTTHIRTHTGEKPFACEFCGRKFARSDERKRHAKIHLKQKEKKAEKGGAPSASSAPPVSLAPVVTTCA

SEQ ID NO: 169 - DNA, 8449 bp, Homo sapiens
gcccgcgccggctgtgctgcacagggggaggagagggaaccccaggcgcgagcgggaagaggggacctgcagccacaacttctctggtcctctgcatcccttctgtccctccacccgtccccttccccaccctctggcccccaccttcttggaggcgacaacccccgggaggcattagaagggatttttcccgcaggttgcgaagggaagcaaacttggtggcaacttgcctcccggtgcgggcgtctctcccccaccgtctcaacatgcttaggggtccggggcccgggctgctgctgctggccgtccagtgcctggggacagcggtgccctccacgggagcctcgaagagcaagaggcaggctcagcaaatggttcagccccagtccccggtggctgtcagtcaaagcaagcccggttgttatgacaatggaaaacactatcagataaatcaacagtgggagcggacctacctaggcaatgcgttggtttgtacttgttatggaggaagccgaggttttaactgcgagagtaaacctgaagctgaagagacttgctttgacaagtacactgggaacacttaccgagtgggtgacacttatgagcgtcctaaagactccatgatctgggactgtacctgcatcggggctgggcgagggagaataagctgtaccatcgcaaaccgctgccatgaagggggtcagtcctacaagattggtgacacctggaggagaccacatgagactggtggttacatgttagagtgtgtgtgtcttggtaatggaaaaggagaatggacctgcaagcccatagctgagaagtgttttgatcatgctgctgggacttcctatgtggtcggagaaacgtgggagaagccctaccaaggctggatgatggtagattgtacttgcctgggagaaggcagcggacgcatcacttgcacttctagaaatagatgcaacgatcaggacacaaggacatcctatagaattggagacacctggagcaagaaggataatcgaggaaacctgctccagtgcatctgcacaggcaacggccgaggagagtggaagtgtgagaggcacacctctgtgcagaccacatcgagcggatctggccccttcaccgatgttcgtgcagctgtttaccaaccgcagcctcacccccagcctcctccctatggccactgtgtcacagacagtggtgtggtctactctgtggggatgcagtggctgaagacacaaggaaataagcaaatgctttgcacgtgcctgggcaacggagtcagctgccaagagacagctgtaacccagacttacggtggcaactcaaatggagagccatgtgtcttaccattcacctacaatggcaggacgttctactcctgcaccacagaagggcgacaggacggacatctttggtgcagcacaacttcgaattatgagcaggaccagaaatactctttctgcacagaccacactgttttggttcagactcgaggaggaaattccaatggtgccttgtgccacttccccttcctatacaacaaccacaattacactgattgcacttctgagggcagaagagacaacatgaagtggtgtgggaccacacagaactatgatgccgaccagaagtttgggttctgccccatggctgcccacgaggaaatctgcacaaccaatgaaggggtcatgtaccgcattggagatcagtgggataagcagcatgacatgggtcacatgatgaggtgcacgtgtgttgggaatggtcgtggggaatggacatgcattgcctactcgcagcttcgagatcagtgcattgttgatgacatcacttacaatgtgaacgacacattccacaagcgtcatgaagaggggcacatgctgaactgtacatgcttcggtcagggtcggggcaggtggaagtgtgatcccgtcgaccaatgccaggattcagagactgggacgttttatcaaattggagattcatgggagaagtatgtgcatggtgtcagataccagtgctactgctatggccgtggcattggggagtggcattgccaacctttacagacctatccaagctcaagtggtcctgtcgaagtatttatcactgagactccgagtcagcccaactcccaccccatccagtggaatgcaccacagccatctcacatttccaagtacattctcaggtggagacctaaaaattctgtaggccgttggaaggaagctaccataccaggccacttaaactcctacaccatcaaaggcctgaagcctggtgtggtatacgagggccagctcatcagcatccagcagtacggccaccaagaagtgactcgctttgacttcaccaccaccagcaccagcacacctgtgaccagcaacaccgtgacaggagagacgactcccttttctcctcttgtggccacttctgaatctgtgaccgaaatcacagccagtagctttgtggtctcctgggtctcagcttccgacaccgtgtcgggattccgggtggaatatgagctgagtgaggagggagatgagccacagtacctggatcttccaagcacagccacttctgtgaacatccctgacctgcttcctggccgaaaatacattgtaaatgtctatcagatatctgaggatggggagcagagtttgatcctgtctacttcacaaacaacagcgcctgatgcccctcctgacccgactgtggaccaagttgatgacacctcaattgttgttcgctggagcagaccccaggctcccatcacagggtacagaatagtctattcgccatcagtagaaggtagcagcacagaactcaaccttcctgaaactgcaaactccgtcaccctcagtgacttgcaacctggtgttcagtataacatcactatctatgctgtggaagaaaatcaagaaagtacacctgttgtcattcaacaagaaaccactggcaccccacgctcagatacagtgccctctcccagggacctgcagtttgtggaagtgacagacgtgaaggtcaccatcatgtggacaccgcctgagagtgcagtgaccggctaccgtgtggatgtgatccccgtcaacctgcctggcgagcacgggcagaggctgcccatcagcaggaacacctttgcagaagtcaccgggctgtcccctggggtcacctattacttcaaagtctttgcagtgagccatgggagggagagcaagcctctgactgctcaacagacaaccaaactggatgctcccactaacctccagtttgtcaatgaaactgattctactgtcctggtgagatggactccacctcgggcccagataacaggataccgactgaccgtgggccttacccgaagaggacagcccaggcagtacaatgtgggtccctctgtctccaagtacccactgaggaatctgcagcctgcatctgagtacaccgtatccctcgtggccataaagggcaaccaagagagccccaaagccactggagtctttaccacactgcagcctgggagctctattccaccttacaacaccgaggtgactgagaccaccattgtgatcacatggacgcctgctccaagaattggttttaagctgggtgtacgaccaagccagggaggagaggcaccacgagaagtgacttcagactcaggaagcatcgttgtgtccggcttgactccaggagtagaatacgtctacaccatccaagtcctgagagatggacaggaaagagatgcgccaattgtaaacaaagtggtgacaccattgtctccaccaacaaacttgcatctggaggcaaaccctgacactggagtgctcacagtctcctgggagaggagcaccaccccagacattactggttatagaattaccacaacccctacaaacggccagcagggaaattctttggaagaagtggtccatgctgatcagagctcctgcacttttgataacctgagtcccggcctggagtacaatgtcagtgtttacactgtcaaggatgacaaggaaagtgtccctatctctgataccatcatcccagctgttcctcctcccactgacctgcgattcaccaacattggtccagacaccatgcgtgtcacctgggctccacccccatccattgatttaaccaacttcctggtgcgttactcacctgtgaaaaatgaggaagatgttgcagagttgtcaatttctccttcagacaatgcagtggtcttaacaaatctcctgcctggtacagaatatgtagtgagtgtctccagtgtctacgaacaacatgagagcacacctcttagaggaagacagaaaacaggtcttgattccccaactggcattgacttttctgatattactgccaactcttttactgtgcactggattgctcctcgagccaccatcactggctacaggatccgccatcatcccgagcacttcagtgggagacctcgagaagatcgggtgccccactctcggaattccatcaccctcaccaacctcactccaggcacagagtatgtggtcagcatcgttgctcttaatggcagagaggaaagtcccttattgattggccaacaatcaacagtttctgatgttccgagggacctggaagttgttgctgcgacccccaccagcctactgatcagctgggatgctcctgctgtcacagtgagatattacaggatcacttacggagagacaggaggaaatagccctgtccaggagttcactgtgcctgggagcaagtctacagctaccatcagcggccttaaacctggagttgattataccatcactgtgtatgctgtcactggccgtggagacagccccgcaagcagcaagccaatttccattaattaccgaacagaaattgacaaaccatcccagatgcaagtgaccgatgttcaggacaacagcattagtgtcaagtggctgccttcaagttcccctgttactggttacagagtaaccaccactcccaaaaatggaccaggaccaacaaaaactaaaactgcaggtccagatcaaacagaaatgactattgaaggcttgcagcccacagtggagtatgtggttagtgtctatgctcagaatccaagcggagagagtcagcctctggttcagactgcagtaaccaacattgatcgccctaaaggactggcattcactgatgtggatgtcgattccatcaaaattgcttgggaaagcccacaggggcaagtttccaggtacagggtgacctactcgagccctgaggatggaatccatgagctattccctgcacctgatggtgaagaagacactgcagagctgcaaggcctcagaccgggttctgagtacacagtcagtgtggttgccttgcacgatgatatggagagccagcccctgattggaacccagtccacagctattcctgcaccaactgacctgaagttcactcaggtcacacccacaagcctgagcgcccagtggacaccacccaatgttcagctcactggatatcgagtgcgggtgacccccaaggagaagaccggaccaatgaaagaaatcaaccttgctcctgacagctcatccgtggttgtatcaggacttatggtggccaccaaatatgaagtgagtgtctatgctcttaaggacactttgacaagcagaccagctcagggagttgtcaccactctggagaatgtcagcccaccaagaagggctcgtgtgacagatgctactgagaccaccatcaccattagctggagaaccaagactgagacgatcactggcttccaagttgatgccgttccagccaatggccagactccaatccagagaaccatcaagccagatgtcagaagctacaccatcacaggtttacaaccaggcactgactacaagatctacctgtacaccttgaatgacaatgctcggagctcccctgtggtcatcgacgcctccactgccattgatgcaccatccaacctgcgtttcctggccaccacacccaattccttgctggtatcatggcagccgccacgtgccaggattaccggctacatcatcaagtatgagaagcctgggtctcctcccagagaagtggtccctcggccccgccctggtgtcacagaggctactattactggcctggaaccgggaaccgaatatacaatttatgtcattgccctgaagaataatcagaagagcgagcccctgattggaaggaaaaagacagacgagcttccccaactggtaacccttccacaccccaatcttcatggaccagagatcttggatgttccttccacagttcaaaagacccctttcgtcacccaccctgggtatgacactggaaatggtattcagcttcctggcacttctggtcagcaacccagtgttgggcaacaaatgatctttgaggaacatggttttaggcggaccacaccgcccacaacggccacccccataaggcataggccaagaccatacccgccgaatgtaggacaagaagctctctctcagacaaccatctcatgggccccattccaggacacttctgagtacatcatttcatgtcatcctgttggcactgatgaagaacccttacagttcagggttcctggaacttctaccagtgccactctgacaggcctcaccagaggtgccacctacaacatcatagtggaggcactgaaagaccagcagaggcataaggttcgggaagaggttgttaccgtgggcaactctgtcaacgaaggcttgaaccaacctacggatgactcgtgctttgacccctacacagtttcccattatgccgttggagatgagtgggaacgaatgtctgaatcaggctttaaactgttgtgccagtgcttaggctttggaagtggtcatttcagatgtgattcatctagatggtgccatgacaatggtgtgaactacaagattggagagaagtgggaccgtcagggagaaaatggccagatgatgagctgcacatgtcttgggaacggaaaaggagaattcaagtgtgaccctcatgaggcaacgtgttatgatgatgggaagacataccacgtaggagaacagtggcagaaggaatatctcggtgccatttgctcctgcacatgctttggaggccagcggggctggcgctgtgacaactgccgcagacctgggggtgaacccagtcccgaaggcactactggccagtcctacaaccagtattctcagagataccatcagagaacaaacactaatgttaattgcccaattgagtgcttcatgcctttagatgtacaggctgacagagaagattcccgagagtaaatcatctttccaatccagaggaacaagcatgtctctctgccaagatccatctaaactggagtgatgttagcagacccagcttagagttcttctttctttcttaagccctttgctctggaggaagttctccagcttcagctcaactcacagcttctccaagcatcaccctgggagtttcctgagggttttctcataaatgagggctgcacattgcctgttctgcttcgaagtattcaataccgctcagtattttaaatgaagtgattctaagatttggtttgggatcaataggaaagcatatgcagccaaccaagatgcaaatgttttgaaatgatatgaccaaaattttaagtaggaaagtcacccaaacacttctgctttcacttaagtgtctggcccgcaatactgtaggaacaagcatgatcttgttactgtgatattttaaatatccacagtactcactttttccaaatgatcctagtaattgcctagaaatatctttctcttacctgttatttatcaatttttcccagtatttttatacggaaaaaattgtattgaaaacacttagtatgcagttgataagaggaatttggtataattatggtgggtgattattttttatactgtatgtgccaaagctttactactgtggaaagacaactgttttaataaaagatttacattccacaacttgaagttcatctatttgatataagacaccttcgggggaaataattcctgtgaatattctttttcaattcagcaaacatttgaaaatctatgatgtgcaagtctaattgttgatttcagtacaagattttctaaatcagttgctacaaaaactgattggtttttgtcacttcatctcttcactaatggagatagctttacactttctgctttaatagatttaagtggaccccaatatttattaaaattgctagtttaccgttcagaagtataatagaaataatctttagttgctcttttctaaccattgtaattcttcccttcttccctccacctttccttcattgaataaacctctgttcaaagagattgcctgcaagggaaataaaaatgactaagatattaaaaaaaaaaaaaaaaaa

SEQ ID NO: 170 - protein, 2355 aa, Homo sapiens
MLRGPGPGLLLLAVQCLGTAVPSTGASKSKRQAQQMVQPQSPVAVSQSKPGCYDNGKHYQINQQWERTYLGNALVCTCYGGSRGFNCESKPEAEETCFDKYTGNTYRVGDTYERPKDSMIWDCTCIGAGRGRISCTIANRCHEGGQSYKIGDTWRRPHETGGYMLECVCLGNGKGEWTCKPIAEKCFDHAAGTSYVVGETWEKPYQGWMMVDCTCLGEGSGRITCTSRNRCNDQDTRTSYRIGDTWSKKDNRGNLLQCICTGNGRGEWKCERHTSVQTTSSGSGPFTDVRAAVYQPQPHPQPPPYGHCVTDSGVVYSVGMQWLKTQGNKQMLCTCLGNGVSCQETAVTQTYGGNSNGEPCVLPFTYNGRTFYSCTTEGRQDGHLWCSTTSNYEQDQKYSFCTDHTVLVQTRGGNSNGALCHFPFLYNNHNYTDCTSEGRRDNMKWCGTTQNYDADQKFGFCPMAAHEEICTTNEGVMYRIGDQWDKQHDMGHMMRCTCVGNGRGEWTCIAYSQLRDQCIVDDITYNVNDTFHKRHEEGHMLNCTCFGQGRGRWKCDPVDQCQDSETGTFYQIGDSWEKYVHGVRYQCYCYGRGIGEWHCQPLQTYPSSSGPVEVFITETPSQPNSHPIQWNAPQPSHISKYILRWRPKNSVGRWKEATIPGHLNSYTIKGLKPGVVYEGQLISIQQYGHQEVTRFDFTTTSTSTPVTSNTVTGETTPFSPLVATSESVTEITASSFVVSWVSASDTVSGFRVEYELSEEGDEPQYLDLPSTATSVNIPDLLPGRKYIVNVYQISEDGEQSLILSTSQTTAPDAPPDPTVDQVDDTSIVVRWSRPQAPITGYRIVYSPSVEGSSTELNLPETANSVTLSDLQPGVQYNITIYAVEENQESTPVVIQQETTGTPRSDTVPSPRDLQFVEVTDVKVTIMWTPPESAVTGYRVDVIPVNLPGEHGQRLPISRNTFAEVTGLSPGVTYYFKVFAVSHGRESKPLTAQQTTKLDAPTNLQFVNETDSTVLVRWTPPRAQITGYRLTVGLTRRGQPRQYNVGPSVSKYPLRNLQPASEYTVSLVAIKGNQESPKATGVFTTLQPGSSIPPYNTEVTETTIVITWTPAPRIGFKLGVRPSQGGEAPREVTSDSGSIVVSGLTPGVEYVYTIQVLRDGQERDAPIVNKVVTPLSPPTNLHLEANPDTGVLTVSWERSTTPDITGYRITTTPTNGQQGNSLEEVVHADQSSCTFDNLSPGLEYNVSVYTVKDDKESVPISDTIIPAVPPPTDLRFTNIGPDTMRVTWAPPPSIDLTNFLVRYSPVKNEEDVAELSISPSDNAVVLTNLLPGTEYVVSVSSVYEQHESTPLRGRQKTGLDSPTGIDFSDITANSFTVHWIAPRATITGYRIRHHPEHFSGRPREDRVPHSRNSITLTNLTPGTEYVVSIVALNGREESPLLIGQQSTVSDVPRDLEVVAATPTSLLISWDAPAVTVRYYRITYGETGGNSPVQEFTVPGSKSTATISGLKPGVDYTITVYAVTGRGDSPASSKPISINYRTEIDKPSQMQVTDVQDNSISVKWLPSSSPVTGYRVTTTPKNGPGPTKTKTAGPDQTEMTIEGLQPTVEYVVSVYAQNPSGESQPLVQTAVTNIDRPKGLAFTDVDVDSIKIAWESPQGQVSRYRVTYSSPEDGIHELFPAPDGEEDTAELQGLRPGSEYTVSVVALHDDMESQPLIGTQSTAIPAPTDLKFTQVTPTSLSAQWTPPNVQLTGYRVRVTPKEKTGPMKEINLAPDSSSVVVSGLMVATKYEVSVYALKDTLTSRPAQGVVTTLENVSPPRRARVTDATETTITISWRTKTETITGFQVDAVPANGQTPIQRTIKPDVRSYTITGLQPGTDYKIYLYTLNDNARSSPVVIDASTAIDAPSNLRFLATTPNSLLVSWQPPRARITGYIIKYEKPGSPPREVVPRPRPGVTEATITGLEPGTEYTIYVIALKNNQKSEPLIGRKKTDELPQLVTLPHPNLHGPEILDVPSTVQKTPFVTHPGYDTGNGIQLPGTSGQQPSVGQQMIFEEHGFRRTTPPTTATPIRHRPRPYPPNVGQEALSQTTISWAPFQDTSEYIISCHPVGTDEEPLQFRVPGTSTSATLTGLTRGATYNIIVEALKDQQRHKVREEVVTVGNSVNEGLNQPTDDSCFDPYTVSHYAVGDEWERMSESGFKLLCQCLGFGSGHFRCDSSRWCHDNGVNYKIGEKWDRQGENGQMMSCTCLGNGKGEFKCDPHEATCYDDGKTYHVGEQWQKEYLGAICSCTCFGGQRGWRCDNCRRPGGEPSPEGTTGQSYNQYSQRYHQRTNTNVNCPIECFMPLDVQADREDSRE

SEQ ID NO: 171 - DNA, 2402 bp, Homo sapiens
gcccgcgccggctgtgctgcacagggggaggagagggaaccccaggcgcgagcgggaagaggggacctgcagccacaacttctctggtcctctgcatcccttctgtccctccacccgtccccttccccaccctctggcccccaccttcttggaggcgacaacccccgggaggcattagaagggatttttcccgcaggttgcgaagggaagcaaacttggtggcaacttgcctcccggtgcgggcgtctctcccccaccgtctcaacatgcttaggggtccggggcccgggctgctgctgctggccgtccagtgcctggggacagcggtgccctccacgggagcctcgaagagcaagaggcaggctcagcaaatggttcagccccagtccccggtggctgtcagtcaaagcaagcccggttgttatgacaatggaaaacactatcagataaatcaacagtgggagcggacctacctaggcaatgcgttggtttgtacttgttatggaggaagccgaggttttaactgcgagagtaaacctgaagctgaagagacttgctttgacaagtacactgggaacacttaccgagtgggtgacacttatgagcgtcctaaagactccatgatctgggactgtacctgcatcggggctgggcgagggagaataagctgtaccatcgcaaaccgctgccatgaagggggtcagtcctacaagattggtgacacctggaggagaccacatgagactggtggttacatgttagagtgtgtgtgtcttggtaatggaaaaggagaatggacctgcaagcccatagctgagaagtgttttgatcatgctgctgggacttcctatgtggtcggagaaacgtgggagaagccctaccaaggctggatgatggtagattgtacttgcctgggagaaggcagcggacgcatcacttgcacttctagaaatagatgcaacgatcaggacacaaggacatcctatagaattggagacacctggagcaagaaggataatcgaggaaacctgctccagtgcatctgcacaggcaacggccgaggagagtggaagtgtgagaggcacacctctgtgcagaccacatcgagcggatctggccccttcaccgatgttcgtgcagctgtttaccaaccgcagcctcacccccagcctcctccctatggccactgtgtcacagacagtggtgtggtctactctgtggggatgcagtggctgaagacacaaggaaataagcaaatgctttgcacgtgcctgggcaacggagtcagctgccaagagacagctgtaacccagacttacggtggcaactcaaatggagagccatgtgtcttaccattcacctacaatggcaggacgttctactcctgcaccacagaagggcgacaggacggacatctttggtgcagcacaacttcgaattatgagcaggaccagaaatactctttctgcacagaccacactgttttggttcagactcgaggaggaaattccaatggtgccttgtgccacttccccttcctatacaacaaccacaattacactgattgcacttctgagggcagaagagacaacatgaagtggtgtgggaccacacagaactatgatgccgaccagaagtttgggttctgccccatggctgcccacgaggaaatctgcacaaccaatgaaggggtcatgtaccgcattggagatcagtgggataagcagcatgacatgggtcacatgatgaggtgcacgtgtgttgggaatggtcgtggggaatggacatgcattgcctactcgcagcttcgagatcagtgcattgttgatgacatcacttacaatgtgaacgacacattccacaagcgtcatgaagaggggcacatgctgaactgtacatgcttcggtcagggtcggggcaggtggaagtgtgatcccgtcgaccaatgccaggattcagagactgggacgttttatcaaattggagattcatgggagaagtatgtgcatggtgtcagataccagtgctactgctatggccgtggcattggggagtggcattgccaacctttacagacctatccaagctcaagtggtcctgtcgaagtatttatcactgagactccgagtcagcccaactcccaccccatccagtggaatgcaccacagccatctcacatttccaagtacattctcaggtggagacctgtgagtatcccacccagaaaccttggatactgagtctcctaatcttatcaattctgatggtttctttttttcccagcttttgagccaacaactctgattaactattcctatagcatttactatatttgtttagtgaacaaacaatatgtggtcaattaaattgacttgtagactgaaaaaaaaaaaaaaaaaaaa

SEQ ID NO: 172 - protein, 657 aa, Homo sapiens
MLRGPGPGLLLLAVQCLGTAVPSTGASKSKRQAQQMVQPQSPVAVSQSKPGCYDNGKHYQINQQWERTYLGNALVCTCYGGSRGFNCESKPEAEETCFDKYTGNTYRVGDTYERPKDSMIWDCTCIGAGRGRISCTIANRCHEGGQSYKIGDTWRRPHETGGYMLECVCLGNGKGEWTCKPIAEKCFDHAAGTSYVVGETWEKPYQGWMMVDCTCLGEGSGRITCTSRNRCNDQDTRTSYRIGDTWSKKDNRGNLLQCICTGNGRGEWKCERHTSVQTTSSGSGPFTDVRAAVYQPQPHPQPPPYGHCVTDSGVVYSVGMQWLKTQGNKQMLCTCLGNGVSCQETAVTQTYGGNSNGEPCVLPFTYNGRTFYSCTTEGRQDGHLWCSTTSNYEQDQKYSFCTDHTVLVQTRGGNSNGALCHFPFLYNNHNYTDCTSEGRRDNMKWCGTTQNYDADQKFGFCPMAAHEEICTTNEGVMYRIGDQWDKQHDMGHMMRCTCVGNGRGEWTCIAYSQLRDQCIVDDITYNVNDTFHKRHEEGHMLNCTCFGQGRGRWKCDPVDQCQDSETGTFYQIGDSWEKYVHGVRYQCYCYGRGIGEWHCQPLQTYPSSSGPVEVFITETPSQPNSHPIQWNAPQPSHISKYILRWRPVSIPPRNLGY

SEQ ID NO: 173 - DNA, 7912 bp, Homo sapiens
gcccgcgccggctgtgctgcacagggggaggagagggaaccccaggcgcgagcgggaagaggggacctgcagccacaacttctctggtcctctgcatcccttctgtccctccacccgtccccttccccaccctctggcccccaccttcttggaggcgacaacccccgggaggcattagaagggatttttcccgcaggttgcgaagggaagcaaacttggtggcaacttgcctcccggtgcgggcgtctctcccccaccgtctcaacatgcttaggggtccggggcccgggctgctgctgctggccgtccagtgcctggggacagcggtgccctccacgggagcctcgaagagcaagaggcaggctcagcaaatggttcagccccagtccccggtggctgtcagtcaaagcaagcccggttgttatgacaatggaaaacactatcagataaatcaacagtgggagcggacctacctaggcaatgcgttggtttgtacttgttatggaggaagccgaggttttaactgcgagagtaaacctgaagctgaagagacttgctttgacaagtacactgggaacacttaccgagtgggtgacacttatgagcgtcctaaagactccatgatctgggactgtacctgcatcggggctgggcgagggagaataagctgtaccatcgcaaaccgctgccatgaagggggtcagtcctacaagattggtgacacctggaggagaccacatgagactggtggttacatgttagagtgtgtgtgtcttggtaatggaaaaggagaatggacctgcaagcccatagctgagaagtgttttgatcatgctgctgggacttcctatgtggtcggagaaacgtgggagaagccctaccaaggctggatgatggtagattgtacttgcctgggagaaggcagcggacgcatcacttgcacttctagaaatagatgcaacgatcaggacacaaggacatcctatagaattggagacacctggagcaagaaggataatcgaggaaacctgctccagtgcatctgcacaggcaacggccgaggagagtggaagtgtgagaggcacacctctgtgcagaccacatcgagcggatctggccccttcaccgatgttcgtgcagctgtttaccaaccgcagcctcacccccagcctcctccctatggccactgtgtcacagacagtggtgtggtctactctgtggggatgcagtggctgaagacacaaggaaataagcaaatgctttgcacgtgcctgggcaacggagtcagctgccaagagacagctgtaacccagacttacggtggcaactcaaatggagagccatgtgtcttaccattcacctacaatggcaggacgttctactcctgcaccacagaagggcgacaggacggacatctttggtgcagcacaacttcgaattatgagcaggaccagaaatactctttctgcacagaccacactgttttggttcagactcgaggaggaaattccaatggtgccttgtgccacttccccttcctatacaacaaccacaattacactgattgcacttctgagggcagaagagacaacatgaagtggtgtgggaccacacagaactatgatgccgaccagaagtttgggttctgccccatggctgcccacgaggaaatctgcacaaccaatgaaggggtcatgtaccgcattggagatcagtgggataagcagcatgacatgggtcacatgatgaggtgcacgtgtgttgggaatggtcgtggggaatggacatgcattgcctactcgcagcttcgagatcagtgcattgttgatgacatcacttacaatgtgaacgacacattccacaagcgtcatgaagaggggcacatgctgaactgtacatgcttcggtcagggtcggggcaggtggaagtgtgatcccgtcgaccaatgccaggattcagagactgggacgttttatcaaattggagattcatgggagaagtatgtgcatggtgtcagataccagtgctactgctatggccgtggcattggggagtggcattgccaacctttacagacctatccaagctcaagtggtcctgtcgaagtatttatcactgagactccgagtcagcccaactcccaccccatccagtggaatgcaccacagccatctcacatttccaagtacattctcaggtggagacctaaaaattctgtaggccgttggaaggaagctaccataccaggccacttaaactcctacaccatcaaaggcctgaagcctggtgtggtatacgagggccagctcatcagcatccagcagtacggccaccaagaagtgactcgctttgacttcaccaccaccagcaccagcacacctgtgaccagcaacaccgtgacaggagagacgactcccttttctcctcttgtggccacttctgaatctgtgaccgaaatcacagccagtagctttgtggtctcctgggtctcagcttccgacaccgtgtcgggattccgggtggaatatgagctgagtgaggagggagatgagccacagtacctggatcttccaagcacagccacttctgtgaacatccctgacctgcttcctggccgaaaatacattgtaaatgtctatcagatatctgaggatggggagcagagtttgatcctgtctacttcacaaacaacagcgcctgatgcccctcctgacccgactgtggaccaagttgatgacacctcaattgttgttcgctggagcagaccccaggctcccatcacagggtacagaatagtctattcgccatcagtagaaggtagcagcacagaactcaaccttcctgaaactgcaaactccgtcaccctcagtgacttgcaacctggtgttcagtataacatcactatctatgctgtggaagaaaatcaagaaagtacacctgttgtcattcaacaagaaaccactggcaccccacgctcagatacagtgccctctcccagggacctgcagtttgtggaagtgacagacgtgaaggtcaccatcatgtggacaccgcctgagagtgcagtgaccggctaccgtgtggatgtgatccccgtcaacctgcctggcgagcacgggcagaggctgcccatcagcaggaacacctttgcagaagtcaccgggctgtcccctggggtcacctattacttcaaagtctttgcagtgagccatgggagggagagcaagcctctgactgctcaacagacaaccaaactggatgctcccactaacctccagtttgtcaatgaaactgattctactgtcctggtgagatggactccacctcgggcccagataacaggataccgactgaccgtgggccttacccgaagaggacagcccaggcagtacaatgtgggtccctctgtctccaagtacccactgaggaatctgcagcctgcatctgagtacaccgtatccctcgtggccataaagggcaaccaagagagccccaaagccactggagtctttaccacactgcagcctgggagctctattccaccttacaacaccgaggtgactgagaccaccattgtgatcacatggacgcctgctccaagaattggttttaagctgggtgtacgaccaagccagggaggagaggcaccacgagaagtgacttcagactcaggaagcatcgttgtgtccggcttgactccaggagtagaatacgtctacaccatccaagtcctgagagatggacaggaaagagatgcgccaattgtaaacaaagtggtgacaccattgtctccaccaacaaacttgcatctggaggcaaaccctgacactggagtgctcacagtctcctgggagaggagcaccaccccagacattactggttatagaattaccacaacccctacaaacggccagcagggaaattctttggaagaagtggtccatgctgatcagagctcctgcacttttgataacctgagtcccggcctggagtacaatgtcagtgtttacactgtcaaggatgacaaggaaagtgtccctatctctgataccatcatcccagctgttcctcctcccactgacctgcgattcaccaacattggtccagacaccatgcgtgtcacctgggctccacccccatccattgatttaaccaacttcctggtgcgttactcacctgtgaaaaatgaggaagatgttgcagagttgtcaatttctccttcagacaatgcagtggtcttaacaaatctcctgcctggtacagaatatgtagtgagtgtctccagtgtctacgaacaacatgagagcacacctcttagaggaagacagaaaacaggtcttgattccccaactggcattgacttttctgatattactgccaactcttttactgtgcactggattgctcctcgagccaccatcactggctacaggatccgccatcatcccgagcacttcagtgggagacctcgagaagatcgggtgccccactctcggaattccatcaccctcaccaacctcactccaggcacagagtatgtggtcagcatcgttgctcttaatggcagagaggaaagtcccttattgattggccaacaatcaacagtttctgatgttccgagggacctggaagttgttgctgcgacccccaccagcctactgatcagctgggatgctcctgctgtcacagtgagatattacaggatcacttacggagagacaggaggaaatagccctgtccaggagttcactgtgcctgggagcaagtctacagctaccatcagcggccttaaacctggagttgattataccatcactgtgtatgctgtcactggccgtggagacagccccgcaagcagcaagccaatttccattaattaccgaacagaaattgacaaaccatcccagatgcaagtgaccgatgttcaggacaacagcattagtgtcaagtggctgccttcaagttcccctgttactggttacagagtaaccaccactcccaaaaatggaccaggaccaacaaaaactaaaactgcaggtccagatcaaacagaaatgactattgaaggcttgcagcccacagtggagtatgtggttagtgtctatgctcagaatccaagcggagagagtcagcctctggttcagactgcagtaaccactattcctgcaccaactgacctgaagttcactcaggtcacacccacaagcctgagcgcccagtggacaccacccaatgttcagctcactggatatcgagtgcgggtgacccccaaggagaagaccggaccaatgaaagaaatcaaccttgctcctgacagctcatccgtggttgtatcaggacttatggtggccaccaaatatgaagtgagtgtctatgctcttaaggacactttgacaagcagaccagctcagggagttgtcaccactctggagaatgtcagcccaccaagaagggctcgtgtgacagatgctactgagaccaccatcaccattagctggagaaccaagactgagacgatcactggcttccaagttgatgccgttccagccaatggccagactccaatccagagaaccatcaagccagatgtcagaagctacaccatcacaggtttacaaccaggcactgactacaagatctacctgtacaccttgaatgacaatgctcggagctcccctgtggtcatcgacgcctccactgccattgatgcaccatccaacctgcgtttcctggccaccacacccaattccttgctggtatcatggcagccgccacgtgccaggattaccggctacatcatcaagtatgagaagcctgggtctcctcccagagaagtggtccctcggccccgccctggtgtcacagaggctactattactggcctggaaccgggaaccgaatatacaatttatgtcattgccctgaagaataatcagaagagcgagcccctgattggaaggaaaaagacaggacaagaagctctctctcagacaaccatctcatgggccccattccaggacacttctgagtacatcatttcatgtcatcctgttggcactgatgaagaacccttacagttcagggttcctggaacttctaccagtgccactctgacaggcctcaccagaggtgccacctacaacatcatagtggaggcactgaaagaccagcagaggcataaggttcgggaagaggttgttaccgtgggcaactctgtcaacgaaggcttgaaccaacctacggatgactcgtgctttgacccctacacagtttcccattatgccgttggagatgagtgggaacgaatgtctgaatcaggctttaaactgttgtgccagtgcttaggctttggaagtggtcatttcagatgtgattcatctagatggtgccatgacaatggtgtgaactacaagattggagagaagtgggaccgtcagggagaaaatggccagatgatgagctgcacatgtcttgggaacggaaaaggagaattcaagtgtgaccctcatgaggcaacgtgttatgatgatgggaagacataccacgtaggagaacagtggcagaaggaatatctcggtgccatttgctcctgcacatgctttggaggccagcggggctggcgctgtgacaactgccgcagacctgggggtgaacccagtcccgaaggcactactggccagtcctacaaccagtattctcagagataccatcagagaacaaacactaatgttaattgcccaattgagtgcttcatgcctttagatgtacaggctgacagagaagattcccgagagtaaatcatctttccaatccagaggaacaagcatgtctctctgccaagatccatctaaactggagtgatgttagcagacccagcttagagttcttctttctttcttaagccctttgctctggaggaagttctccagcttcagctcaactcacagcttctccaagcatcaccctgggagtttcctgagggttttctcataaatgagggctgcacattgcctgttctgcttcgaagtattcaataccgctcagtattttaaatgaagtgattctaagatttggtttgggatcaataggaaagcatatgcagccaaccaagatgcaaatgttttgaaatgatatgaccaaaattttaagtaggaaagtcacccaaacacttctgctttcacttaagtgtctggcccgcaatactgtaggaacaagcatgatcttgttactgtgatattttaaatatccacagtactcactttttccaaatgatcctagtaattgcctagaaatatctttctcttacctgttatttatcaatttttcccagtatttttatacggaaaaaattgtattgaaaacacttagtatgcagttgataagaggaatttggtataattatggtgggtgattattttttatactgtatgtgccaaagctttactactgtggaaagacaactgttttaataaaagatttacattccacaacttgaagttcatctatttgatataagacaccttcgggggaaataattcctgtgaatattctttttcaattcagcaaacatttgaaaatctatgatgtgcaagtctaattgttgatttcagtacaagattttctaaatcagttgctacaaaaactgattggtttttgtcacttcatctcttcactaatggagatagctttacactttctgctttaatagatttaagtggaccccaatatttattaaaattgctagtttaccgttcagaagtataatagaaataatctttagttgctcttttctaaccattgtaattcttcccttcttccctccacctttccttcattgaataaacctctgttcaaagagattgcctgcaagggaaataaaaatgactaagatattaaaaaaaaaaaaaaaaaa

SEQ ID NO: 174 - protein, 2176 aa, Homo sapiens
MLRGPGPGLLLLAVQCLGTAVPSTGASKSKRQAQQMVQPQSPVAVSQSKPGCYDNGKHYQINQQWERTYLGNALVCTCYGGSRGFNCESKPEAEETCFDKYTGNTYRVGDTYERPKDSMIWDCTCIGAGRGRISCTIANRCHEGGQSYKIGDTWRRPHETGGYMLECVCLGNGKGEWTCKPIAEKCFDHAAGTSYVVGETWEKPYQGWMMVDCTCLGEGSGRITCTSRNRCNDQDTRTSYRIGDTWSKKDNRGNLLQCICTGNGRGEWKCERHTSVQTTSSGSGPFTDVRAAVYQPQPHPQPPPYGHCVTDSGVVYSVGMQWLKTQGNKQMLCTCLGNGVSCQETAVTQTYGGNSNGEPCVLPFTYNGRTFYSCTTEGRQDGHLWCSTTSNYEQDQKYSFCTDHTVLVQTRGGNSNGALCHFPFLYNNHNYTDCTSEGRRDNMKWCGTTQNYDADQKFGFCPMAAHEEICTTNEGVMYRIGDQWDKQHDMGHMMRCTCVGNGRGEWTCIAYSQLRDQCIVDDITYNVNDTFHKRHEEGHMLNCTCFGQGRGRWKCDPVDQCQDSETGTFYQIGDSWEKYVHGVRYQCYCYGRGIGEWHCQPLQTYPSSSGPVEVFITETPSQPNSHPIQWNAPQPSHISKYILRWRPKNSVGRWKEATIPGHLNSYTIKGLKPGVVYEGQLISIQQYGHQEVTRFDFTTTSTSTPVTSNTVTGETTPFSPLVATSESVTEITASSFVVSWVSASDTVSGFRVEYELSEEGDEPQYLDLPSTATSVNIPDLLPGRKYIVNVYQISEDGEQSLILSTSQTTAPDAPPDPTVDQVDDTSIVVRWSRPQAPITGYRIVYSPSVEGSSTELNLPETANSVTLSDLQPGVQYNITIYAVEENQESTPVVIQQETTGTPRSDTVPSPRDLQFVEVTDVKVTIMWTPPESAVTGYRVDVIPVNLPGEHGQRLPISRNTFAEVTGLSPGVTYYFKVFAVSHGRESKPLTAQQTTKLDAPTNLQFVNETDSTVLVRWTPPRAQITGYRLTVGLTRRGQPRQYNVGPSVSKYPLRNLQPASEYTVSLVAIKGNQESPKATGVFTTLQPGSSIPPYNTEVTETTIVITWTPAPRIGFKLGVRPSQGGEAPREVTSDSGSIVVSGLTPGVEYVYTIQVLRDGQERDAPIVNKVVTPLSPPTNLHLEANPDTGVLTVSWERSTTPDITGYRITTTPTNGQQGNSLEEVVHADQSSCTFDNLSPGLEYNVSVYTVKDDKESVPISDTIIPAVPPPTDLRFTNIGPDTMRVTWAPPPSIDLTNFLVRYSPVKNEEDVAELSISPSDNAVVLTNLLPGTEYVVSVSSVYEQHESTPLRGRQKTGLDSPTGIDFSDITANSFTVHWIAPRATITGYRIRHHPEHFSGRPREDRVPHSRNSITLTNLTPGTEYVVSIVALNGREESPLLIGQQSTVSDVPRDLEVVAATPTSLLISWDAPAVTVRYYRITYGETGGNSPVQEFTVPGSKSTATISGLKPGVDYTITVYAVTGRGDSPASSKPISINYRTEIDKPSQMQVTDVQDNSISVKWLPSSSPVTGYRVTTTPKNGPGPTKTKTAGPDQTEMTIEGLQPTVEYVVSVYAQNPSGESQPLVQTAVTTIPAPTDLKFTQVTPTSLSAQWTPPNVQLTGYRVRVTPKEKTGPMKEINLAPDSSSVVVSGLMVATKYEVSVYALKDTLTSRPAQGVVTTLENVSPPRRARVTDATETTITISWRTKTETITGFQVDAVPANGQTPIQRTIKPDVRSYTITGLQPGTDYKIYLYTLNDNARSSPVVIDASTAIDAPSNLRFLATTPNSLLVSWQPPRARITGYIIKYEKPGSPPREVVPRPRPGVTEATITGLEPGTEYTIYVIALKNNQKSEPLIGRKKTGQEALSQTTISWAPFQDTSEYIISCHPVGTDEEPLQFRVPGTSTSATLTGLTRGATYNIIVEALKDQQRHKVREEVVTVGNSVNEGLNQPTDDSCFDPYTVSHYAVGDEWERMSESGFKLLCQCLGFGSGHFRCDSSRWCHDNGVNYKIGEKWDRQGENGQMMSCTCLGNGKGEFKCDPHEATCYDDGKTYHVGEQWQKEYLGAICSCTCFGGQRGWRCDNCRRPGGEPSPEGTTGQSYNQYSQRYHQRTNTNVNCPIECFMPLDVQADREDSRE

SEQ ID NO: 175 - DNA, 8272 bp, Homo sapiens
gcccgcgccggctgtgctgcacagggggaggagagggaaccccaggcgcgagcgggaagaggggacctgcagccacaacttctctggtcctctgcatcccttctgtccctccacccgtccccttccccaccctctggcccccaccttcttggaggcgacaacccccgggaggcattagaagggatttttcccgcaggttgcgaagggaagcaaacttggtggcaacttgcctcccggtgcgggcgtctctcccccaccgtctcaacatgcttaggggtccggggcccgggctgctgctgctggccgtccagtgcctggggacagcggtgccctccacgggagcctcgaagagcaagaggcaggctcagcaaatggttcagccccagtccccggtggctgtcagtcaaagcaagcccggttgttatgacaatggaaaacactatcagataaatcaacagtgggagcggacctacctaggcaatgcgttggtttgtacttgttatggaggaagccgaggttttaactgcgagagtaaacctgaagctgaagagacttgctttgacaagtacactgggaacacttaccgagtgggtgacacttatgagcgtcctaaagactccatgatctgggactgtacctgcatcggggctgggcgagggagaataagctgtaccatcgcaaaccgctgccatgaagggggtcagtcctacaagattggtgacacctggaggagaccacatgagactggtggttacatgttagagtgtgtgtgtcttggtaatggaaaaggagaatggacctgcaagcccatagctgagaagtgttttgatcatgctgctgggacttcctatgtggtcggagaaacgtgggagaagccctaccaaggctggatgatggtagattgtacttgcctgggagaaggcagcggacgcatcacttgcacttctagaaatagatgcaacgatcaggacacaaggacatcctatagaattggagacacctggagcaagaaggataatcgaggaaacctgctccagtgcatctgcacaggcaacggccgaggagagtggaagtgtgagaggcacacctctgtgcagaccacatcgagcggatctggccccttcaccgatgttcgtgcagctgtttaccaaccgcagcctcacccccagcctcctccctatggccactgtgtcacagacagtggtgtggtctactctgtggggatgcagtggctgaagacacaaggaaataagcaaatgctttgcacgtgcctgggcaacggagtcagctgccaagagacagctgtaacccagacttacggtggcaactcaaatggagagccatgtgtcttaccattcacctacaatggcaggacgttctactcctgcaccacagaagggcgacaggacggacatctttggtgcagcacaacttcgaattatgagcaggaccagaaatactctttctgcacagaccacactgttttggttcagactcgaggaggaaattccaatggtgccttgtgccacttccccttcctatacaacaaccacaattacactgattgcacttctgagggcagaagagacaacatgaagtggtgtgggaccacacagaactatgatgccgaccagaagtttgggttctgccccatggctgcccacgaggaaatctgcacaaccaatgaaggggtcatgtaccgcattggagatcagtgggataagcagcatgacatgggtcacatgatgaggtgcacgtgtgttgggaatggtcgtggggaatggacatgcattgcctactcgcagcttcgagatcagtgcattgttgatgacatcacttacaatgtgaacgacacattccacaagcgtcatgaagaggggcacatgctgaactgtacatgcttcggtcagggtcggggcaggtggaagtgtgatcccgtcgaccaatgccaggattcagagactgggacgttttatcaaattggagattcatgggagaagtatgtgcatggtgtcagataccagtgctactgctatggccgtggcattggggagtggcattgccaacctttacagacctatccaagctcaagtggtcctgtcgaagtatttatcactgagactccgagtcagcccaactcccaccccatccagtggaatgcaccacagccatctcacatttccaagtacattctcaggtggagacctaaaaattctgtaggccgttggaaggaagctaccataccaggccacttaaactcctacaccatcaaaggcctgaagcctggtgtggtatacgagggccagctcatcagcatccagcagtacggccaccaagaagtgactcgctttgacttcaccaccaccagcaccagcacacctgtgaccagcaacaccgtgacaggagagacgactcccttttctcctcttgtggccacttctgaatctgtgaccgaaatcacagccagtagctttgtggtctcctgggtctcagcttccgacaccgtgtcgggattccgggtggaatatgagctgagtgaggagggagatgagccacagtacctggatcttccaagcacagccacttctgtgaacatccctgacctgcttcctggccgaaaatacattgtaaatgtctatcagatatctgaggatggggagcagagtttgatcctgtctacttcacaaacaacagcgcctgatgcccctcctgacccgactgtggaccaagttgatgacacctcaattgttgttcgctggagcagaccccaggctcccatcacagggtacagaatagtctattcgccatcagtagaaggtagcagcacagaactcaaccttcctgaaactgcaaactccgtcaccctcagtgacttgcaacctggtgttcagtataacatcactatctatgctgtggaagaaaatcaagaaagtacacctgttgtcattcaacaagaaaccactggcaccccacgctcagatacagtgccctctcccagggacctgcagtttgtggaagtgacagacgtgaaggtcaccatcatgtggacaccgcctgagagtgcagtgaccggctaccgtgtggatgtgatccccgtcaacctgcctggcgagcacgggcagaggctgcccatcagcaggaacacctttgcagaagtcaccgggctgtcccctggggtcacctattacttcaaagtctttgcagtgagccatgggagggagagcaagcctctgactgctcaacagacaaccaaactggatgctcccactaacctccagtttgtcaatgaaactgattctactgtcctggtgagatggactccacctcgggcccagataacaggataccgactgaccgtgggccttacccgaagaggacagcccaggcagtacaatgtgggtccctctgtctccaagtacccactgaggaatctgcagcctgcatctgagtacaccgtatccctcgtggccataaagggcaaccaagagagccccaaagccactggagtctttaccacactgcagcctgggagctctattccaccttacaacaccgaggtgactgagaccaccattgtgatcacatggacgcctgctccaagaattggttttaagctgggtgtacgaccaagccagggaggagaggcaccacgagaagtgacttcagactcaggaagcatcgttgtgtccggcttgactccaggagtagaatacgtctacaccatccaagtcctgagagatggacaggaaagagatgcgccaattgtaaacaaagtggtgacaccattgtctccaccaacaaacttgcatctggaggcaaaccctgacactggagtgctcacagtctcctgggagaggagcaccaccccagacattactggttatagaattaccacaacccctacaaacggccagcagggaaattctttggaagaagtggtccatgctgatcagagctcctgcacttttgataacctgagtcccggcctggagtacaatgtcagtgtttacactgtcaaggatgacaaggaaagtgtccctatctctgataccatcatcccagctgttcctcctcccactgacctgcgattcaccaacattggtccagacaccatgcgtgtcacctgggctccacccccatccattgatttaaccaacttcctggtgcgttactcacctgtgaaaaatgaggaagatgttgcagagttgtcaatttctccttcagacaatgcagtggtcttaacaaatctcctgcctggtacagaatatgtagtgagtgtctccagtgtctacgaacaacatgagagcacacctcttagaggaagacagaaaacaggtcttgattccccaactggcattgacttttctgatattactgccaactcttttactgtgcactggattgctcctcgagccaccatcactggctacaggatccgccatcatcccgagcacttcagtgggagacctcgagaagatcgggtgccccactctcggaattccatcaccctcaccaacctcactccaggcacagagtatgtggtcagcatcgttgctcttaatggcagagaggaaagtcccttattgattggccaacaatcaacagtttctgatgttccgagggacctggaagttgttgctgcgacccccaccagcctactgatcagctgggatgctcctgctgtcacagtgagatattacaggatcacttacggagagacaggaggaaatagccctgtccaggagttcactgtgcctgggagcaagtctacagctaccatcagcggccttaaacctggagttgattataccatcactgtgtatgctgtcactggccgtggagacagccccgcaagcagcaagccaatttccattaattaccgaacagaaattgacaaaccatcccagatgcaagtgaccgatgttcaggacaacagcattagtgtcaagtggctgccttcaagttcccctgttactggttacagagtaaccaccactcccaaaaatggaccaggaccaacaaaaactaaaactgcaggtccagatcaaacagaaatgactattgaaggcttgcagcccacagtggagtatgtggttagtgtctatgctcagaatccaagcggagagagtcagcctctggttcagactgcagtaaccactattcctgcaccaactgacctgaagttcactcaggtcacacccacaagcctgagcgcccagtggacaccacccaatgttcagctcactggatatcgagtgcgggtgacccccaaggagaagaccggaccaatgaaagaaatcaaccttgctcctgacagctcatccgtggttgtatcaggacttatggtggccaccaaatatgaagtgagtgtctatgctcttaaggacactttgacaagcagaccagctcagggagttgtcaccactctggagaatgtcagcccaccaagaagggctcgtgtgacagatgctactgagaccaccatcaccattagctggagaaccaagactgagacgatcactggcttccaagttgatgccgttccagccaatggccagactccaatccagagaaccatcaagccagatgtcagaagctacaccatcacaggtttacaaccaggcactgactacaagatctacctgtacaccttgaatgacaatgctcggagctcccctgtggtcatcgacgcctccactgccattgatgcaccatccaacctgcgtttcctggccaccacacccaattccttgctggtatcatggcagccgccacgtgccaggattaccggctacatcatcaagtatgagaagcctgggtctcctcccagagaagtggtccctcggccccgccctggtgtcacagaggctactattactggcctggaaccgggaaccgaatatacaatttatgtcattgccctgaagaataatcagaagagcgagcccctgattggaaggaaaaagacagacgagcttccccaactggtaacccttccacaccccaatcttcatggaccagagatcttggatgttccttccacagttcaaaagacccctttcgtcacccaccctgggtatgacactggaaatggtattcagcttcctggcacttctggtcagcaacccagtgttgggcaacaaatgatctttgaggaacatggttttaggcggaccacaccgcccacaacggccacccccataaggcataggccaagaccatacccgccgaatgtaggtgaggaaatccaaattggtcacatccccagggaagatgtagactatcacctgtacccacacggtccgggactcaatccaaatgcctctacaggacaagaagctctctctcagacaaccatctcatgggccccattccaggacacttctgagtacatcatttcatgtcatcctgttggcactgatgaagaacccttacagttcagggttcctggaacttctaccagtgccactctgacaggcctcaccagaggtgccacctacaacatcatagtggaggcactgaaagaccagcagaggcataaggttcgggaagaggttgttaccgtgggcaactctgtcaacgaaggcttgaaccaacctacggatgactcgtgctttgacccctacacagtttcccattatgccgttggagatgagtgggaacgaatgtctgaatcaggctttaaactgttgtgccagtgcttaggctttggaagtggtcatttcagatgtgattcatctagatggtgccatgacaatggtgtgaactacaagattggagagaagtgggaccgtcagggagaaaatggccagatgatgagctgcacatgtcttgggaacggaaaaggagaattcaagtgtgaccctcatgaggcaacgtgttatgatgatgggaagacataccacgtaggagaacagtggcagaaggaatatctcggtgccatttgctcctgcacatgctttggaggccagcggggctggcgctgtgacaactgccgcagacctgggggtgaacccagtcccgaaggcactactggccagtcctacaaccagtattctcagagataccatcagagaacaaacactaatgttaattgcccaattgagtgcttcatgcctttagatgtacaggctgacagagaagattcccgagagtaaatcatctttccaatccagaggaacaagcatgtctctctgccaagatccatctaaactggagtgatgttagcagacccagcttagagttcttctttctttcttaagccctttgctctggaggaagttctccagcttcagctcaactcacagcttctccaagcatcaccctgggagtttcctgagggttttctcataaatgagggctgcacattgcctgttctgcttcgaagtattcaataccgctcagtattttaaatgaagtgattctaagatttggtttgggatcaataggaaagcatatgcagccaaccaagatgcaaatgttttgaaatgatatgaccaaaattttaagtaggaaagtcacccaaacacttctgctttcacttaagtgtctggcccgcaatactgtaggaacaagcatgatcttgttactgtgatattttaaatatccacagtactcactttttccaaatgatcctagtaattgcctagaaatatctttctcttacctgttatttatcaatttttcccagtatttttatacggaaaaaattgtattgaaaacacttagtatgcagttgataagaggaatttggtataattatggtgggtgattattttttatactgtatgtgccaaagctttactactgtggaaagacaactgttttaataaaagatttacattccacaacttgaagttcatctatttgatataagacaccttcgggggaaataattcctgtgaatattctttttcaattcagcaaacatttgaaaatctatgatgtgcaagtctaattgttgatttcagtacaagattttctaaatcagttgctacaaaaactgattggtttttgtcacttcatctcttcactaatggagatagctttacactttctgctttaatagatttaagtggaccccaatatttattaaaattgctagtttaccgttcagaagtataatagaaataatctttagttgctcttttctaaccattgtaattcttcccttcttccctccacctttccttcattgaataaacctctgttcaaagagattgcctgcaagggaaataaaaatgactaagatattaaaaaaaaaaaaaaaaaa

SEQ ID NO: 176 - protein, 2296 aa, Homo sapiens
MLRGPGPGLLLLAVQCLGTAVPSTGASKSKRQAQQMVQPQSPVAVSQSKPGCYDNGKHYQINQQWERTYLGNALVCTCYGGSRGFNCESKPEAEETCFDKYTGNTYRVGDTYERPKDSMIWDCTCIGAGRGRISCTIANRCHEGGQSYKIGDTWRRPHETGGYMLECVCLGNGKGEWTCKPIAEKCFDHAAGTSYVVGETWEKPYQGWMMVDCTCLGEGSGRITCTSRNRCNDQDTRTSYRIGDTWSKKDNRGNLLQCICTGNGRGEWKCERHTSVQTTSSGSGPFTDVRAAVYQPQPHPQPPPYGHCVTDSGVVYSVGMQWLKTQGNKQMLCTCLGNGVSCQETAVTQTYGGNSNGEPCVLPFTYNGRTFYSCTTEGRQDGHLWCSTTSNYEQDQKYSFCTDHTVLVQTRGGNSNGALCHFPFLYNNHNYTDCTSEGRRDNMKWCGTTQNYDADQKFGFCPMAAHEEICTTNEGVMYRIGDQWDKQHDMGHMMRCTCVGNGRGEWTCIAYSQLRDQCIVDDITYNVNDTFHKRHEEGHMLNCTCFGQGRGRWKCDPVDQCQDSETGTFYQIGDSWEKYVHGVRYQCYCYGRGIGEWHCQPLQTYPSSSGPVEVFITETPSQPNSHPIQWNAPQPSHISKYILRWRPKNSVGRWKEATIPGHLNSYTIKGLKPGVVYEGQLISIQQYGHQEVTRFDFTTTSTSTPVTSNTVTGETTPFSPLVATSESVTEITASSFVVSWVSASDTVSGFRVEYELSEEGDEPQYLDLPSTATSVNIPDLLPGRKYIVNVYQISEDGEQSLILSTSQTTAPDAPPDPTVDQVDDTSIVVRWSRPQAPITGYRIVYSPSVEGSSTELNLPETANSVTLSDLQPGVQYNITIYAVEENQESTPVVIQQETTGTPRSDTVPSPRDLQFVEVTDVKVTIMWTPPESAVTGYRVDVIPVNLPGEHGQRLPISRNTFAEVTGLSPGVTYYFKVFAVSHGRESKPLTAQQTTKLDAPTNLQFVNETDSTVLVRWTPPRAQITGYRLTVGLTRRGQPRQYNVGPSVSKYPLRNLQPASEYTVSLVAIKGNQESPKATGVFTTLQPGSSIPPYNTEVTETTIVITWTPAPRIGFKLGVRPSQGGEAPREVTSDSGSIVVSGLTPGVEYVYTIQVLRDGQERDAPIVNKVVTPLSPPTNLHLEANPDTGVLTVSWERSTTPDITGYRITTTPTNGQQGNSLEEVVHADQSSCTFDNLSPGLEYNVSVYTVKDDKESVPISDTIIPAVPPPTDLRFTNIGPDTMRVTWAPPPSIDLTNFLVRYSPVKNEEDVAELSISPSDNAVVLTNLLPGTEYVVSVSSVYEQHESTPLRGRQKTGLDSPTGIDFSDITANSFTVHWIAPRATITGYRIRHHPEHFSGRPREDRVPHSRNSITLTNLTPGTEYVVSIVALNGREESPLLIGQQSTVSDVPRDLEVVAATPTSLLISWDAPAVTVRYYRITYGETGGNSPVQEFTVPGSKSTATISGLKPGVDYTITVYAVTGRGDSPASSKPISINYRTEIDKPSQMQVTDVQDNSISVKWLPSSSPVTGYRVTTTPKNGPGPTKTKTAGPDQTEMTIEGLQPTVEYVVSVYAQNPSGESQPLVQTAVTTIPAPTDLKFTQVTPTSLSAQWTPPNVQLTGYRVRVTPKEKTGPMKEINLAPDSSSVVVSGLMVATKYEVSVYALKDTLTSRPAQGVVTTLENVSPPRRARVTDATETTITISWRTKTETITGFQVDAVPANGQTPIQRTIKPDVRSYTITGLQPGTDYKIYLYTLNDNARSSPVVIDASTAIDAPSNLRFLATTPNSLLVSWQPPRARITGYIIKYEKPGSPPREVVPRPRPGVTEATITGLEPGTEYTIYVIALKNNQKSEPLIGRKKTDELPQLVTLPHPNLHGPEILDVPSTVQKTPFVTHPGYDTGNGIQLPGTSGQQPSVGQQMIFEEHGFRRTTPPTTATPIRHRPRPYPPNVGEEIQIGHIPREDVDYHLYPHGPGLNPNASTGQEALSQTTISWAPFQDTSEYIISCHPVGTDEEPLQFRVPGTSTSATLTGLTRGATYNIIVEALKDQQRHKVREEVVTVGNSVNEGLNQPTDDSCFDPYTVSHYAVGDEWERMSESGFKLLCQCLGFGSGHFRCDSSRWCHDNGVNYKIGEKWDRQGENGQMMSCTCLGNGKGEFKCDPHEATCYDDGKTYHVGEQWQKEYLGAICSCTCFGGQRGWRCDNCRRPGGEPSPEGTTGQSYNQYSQRYHQRTNTNVNCPIECFMPLDVQADREDSRE

SEQ ID NO: 177 - DNA, 8374 bp, Homo sapiens
gcccgcgccggctgtgctgcacagggggaggagagggaaccccaggcgcgagcgggaagaggggacctgcagccacaacttctctggtcctctgcatcccttctgtccctccacccgtccccttccccaccctctggcccccaccttcttggaggcgacaacccccgggaggcattagaagggatttttcccgcaggttgcgaagggaagcaaacttggtggcaacttgcctcccggtgcgggcgtctctcccccaccgtctcaacatgcttaggggtccggggcccgggctgctgctgctggccgtccagtgcctggggacagcggtgccctccacgggagcctcgaagagcaagaggcaggctcagcaaatggttcagccccagtccccggtggctgtcagtcaaagcaagcccggttgttatgacaatggaaaacactatcagataaatcaacagtgggagcggacctacctaggcaatgcgttggtttgtacttgttatggaggaagccgaggttttaactgcgagagtaaacctgaagctgaagagacttgctttgacaagtacactgggaacacttaccgagtgggtgacacttatgagcgtcctaaagactccatgatctgggactgtacctgcatcggggctgggcgagggagaataagctgtaccatcgcaaaccgctgccatgaagggggtcagtcctacaagattggtgacacctggaggagaccacatgagactggtggttacatgttagagtgtgtgtgtcttggtaatggaaaaggagaatggacctgcaagcccatagctgagaagtgttttgatcatgctgctgggacttcctatgtggtcggagaaacgtgggagaagccctaccaaggctggatgatggtagattgtacttgcctgggagaaggcagcggacgcatcacttgcacttctagaaatagatgcaacgatcaggacacaaggacatcctatagaattggagacacctggagcaagaaggataatcgaggaaacctgctccagtgcatctgcacaggcaacggccgaggagagtggaagtgtgagaggcacacctctgtgcagaccacatcgagcggatctggccccttcaccgatgttcgtgcagctgtttaccaaccgcagcctcacccccagcctcctccctatggccactgtgtcacagacagtggtgtggtctactctgtggggatgcagtggctgaagacacaaggaaataagcaaatgctttgcacgtgcctgggcaacggagtcagctgccaagagacagctgtaacccagacttacggtggcaactcaaatggagagccatgtgtcttaccattcacctacaatggcaggacgttctactcctgcaccacagaagggcgacaggacggacatctttggtgcagcacaacttcgaattatgagcaggaccagaaatactctttctgcacagaccacactgttttggttcagactcgaggaggaaattccaatggtgccttgtgccacttccccttcctatacaacaaccacaattacactgattgcacttctgagggcagaagagacaacatgaagtggtgtgggaccacacagaactatgatgccgaccagaagtttgggttctgccccatggctgcccacgaggaaatctgcacaaccaatgaaggggtcatgtaccgcattggagatcagtgggataagcagcatgacatgggtcacatgatgaggtgcacgtgtgttgggaatggtcgtggggaatggacatgcattgcctactcgcagcttcgagatcagtgcattgttgatgacatcacttacaatgtgaacgacacattccacaagcgtcatgaagaggggcacatgctgaactgtacatgcttcggtcagggtcggggcaggtggaagtgtgatcccgtcgaccaatgccaggattcagagactgggacgttttatcaaattggagattcatgggagaagtatgtgcatggtgtcagataccagtgctactgctatggccgtggcattggggagtggcattgccaacctttacagacctatccaagctcaagtggtcctgtcgaagtatttatcactgagactccgagtcagcccaactcccaccccatccagtggaatgcaccacagccatctcacatttccaagtacattctcaggtggagacctaaaaattctgtaggccgttggaaggaagctaccataccaggccacttaaactcctacaccatcaaaggcctgaagcctggtgtggtatacgagggccagctcatcagcatccagcagtacggccaccaagaagtgactcgctttgacttcaccaccaccagcaccagcacacctgtgaccagcaacaccgtgacaggagagacgactcccttttctcctcttgtggccacttctgaatctgtgaccgaaatcacagccagtagctttgtggtctcctgggtctcagcttccgacaccgtgtcgggattccgggtggaatatgagctgagtgaggagggagatgagccacagtacctggatcttccaagcacagccacttctgtgaacatccctgacctgcttcctggccgaaaatacattgtaaatgtctatcagatatctgaggatggggagcagagtttgatcctgtctacttcacaaacaacagcgcctgatgcccctcctgacccgactgtggaccaagttgatgacacctcaattgttgttcgctggagcagaccccaggctcccatcacagggtacagaatagtctattcgccatcagtagaaggtagcagcacagaactcaaccttcctgaaactgcaaactccgtcaccctcagtgacttgcaacctggtgttcagtataacatcactatctatgctgtggaagaaaatcaagaaagtacacctgttgtcattcaacaagaaaccactggcaccccacgctcagatacagtgccctctcccagggacctgcagtttgtggaagtgacagacgtgaaggtcaccatcatgtggacaccgcctgagagtgcagtgaccggctaccgtgtggatgtgatccccgtcaacctgcctggcgagcacgggcagaggctgcccatcagcaggaacacctttgcagaagtcaccgggctgtcccctggggtcacctattacttcaaagtctttgcagtgagccatgggagggagagcaagcctctgactgctcaacagacaaccaaactggatgctcccactaacctccagtttgtcaatgaaactgattctactgtcctggtgagatggactccacctcgggcccagataacaggataccgactgaccgtgggccttacccgaagaggacagcccaggcagtacaatgtgggtccctctgtctccaagtacccactgaggaatctgcagcctgcatctgagtacaccgtatccctcgtggccataaagggcaaccaagagagccccaaagccactggagtctttaccacactgcagcctgggagctctattccaccttacaacaccgaggtgactgagaccaccattgtgatcacatggacgcctgctccaagaattggttttaagctgggtgtacgaccaagccagggaggagaggcaccacgagaagtgacttcagactcaggaagcatcgttgtgtccggcttgactccaggagtagaatacgtctacaccatccaagtcctgagagatggacaggaaagagatgcgccaattgtaaacaaagtggtgacaccattgtctccaccaacaaacttgcatctggaggcaaaccctgacactggagtgctcacagtctcctgggagaggagcaccaccccagacattactggttatagaattaccacaacccctacaaacggccagcagggaaattctttggaagaagtggtccatgctgatcagagctcctgcacttttgataacctgagtcccggcctggagtacaatgtcagtgtttacactgtcaaggatgacaaggaaagtgtccctatctctgataccatcatcccagctgttcctcctcccactgacctgcgattcaccaacattggtccagacaccatgcgtgtcacctgggctccacccccatccattgatttaaccaacttcctggtgcgttactcacctgtgaaaaatgaggaagatgttgcagagttgtcaatttctccttcagacaatgcagtggtcttaacaaatctcctgcctggtacagaatatgtagtgagtgtctccagtgtctacgaacaacatgagagcacacctcttagaggaagacagaaaacaggtcttgattccccaactggcattgacttttctgatattactgccaactcttttactgtgcactggattgctcctcgagccaccatcactggctacaggatccgccatcatcccgagcacttcagtgggagacctcgagaagatcgggtgccccactctcggaattccatcaccctcaccaacctcactccaggcacagagtatgtggtcagcatcgttgctcttaatggcagagaggaaagtcccttattgattggccaacaatcaacagtttctgatgttccgagggacctggaagttgttgctgcgacccccaccagcctactgatcagctgggatgctcctgctgtcacagtgagatattacaggatcacttacggagagacaggaggaaatagccctgtccaggagttcactgtgcctgggagcaagtctacagctaccatcagcggccttaaacctggagttgattataccatcactgtgtatgctgtcactggccgtggagacagccccgcaagcagcaagccaatttccattaattaccgaacagaaattgacaaaccatcccagatgcaagtgaccgatgttcaggacaacagcattagtgtcaagtggctgccttcaagttcccctgttactggttacagagtaaccaccactcccaaaaatggaccaggaccaacaaaaactaaaactgcaggtccagatcaaacagaaatgactattgaaggcttgcagcccacagtggagtatgtggttagtgtctatgctcagaatccaagcggagagagtcagcctctggttcagactgcagtaaccaacattgatcgccctaaaggactggcattcactgatgtggatgtcgattccatcaaaattgcttgggaaagcccacaggggcaagtttccaggtacagggtgacctactcgagccctgaggatggaatccatgagctattccctgcacctgatggtgaagaagacactgcagagctgcaaggcctcagaccgggttctgagtacacagtcagtgtggttgccttgcacgatgatatggagagccagcccctgattggaacccagtccacagctattcctgcaccaactgacctgaagttcactcaggtcacacccacaagcctgagcgcccagtggacaccacccaatgttcagctcactggatatcgagtgcgggtgacccccaaggagaagaccggaccaatgaaagaaatcaaccttgctcctgacagctcatccgtggttgtatcaggacttatggtggccaccaaatatgaagtgagtgtctatgctcttaaggacactttgacaagcagaccagctcagggagttgtcaccactctggagaatgtcagcccaccaagaagggctcgtgtgacagatgctactgagaccaccatcaccattagctggagaaccaagactgagacgatcactggcttccaagttgatgccgttccagccaatggccagactccaatccagagaaccatcaagccagatgtcagaagctacaccatcacaggtttacaaccaggcactgactacaagatctacctgtacaccttgaatgacaatgctcggagctcccctgtggtcatcgacgcctccactgccattgatgcaccatccaacctgcgtttcctggccaccacacccaattccttgctggtatcatggcagccgccacgtgccaggattaccggctacatcatcaagtatgagaagcctgggtctcctcccagagaagtggtccctcggccccgccctggtgtcacagaggctactattactggcctggaaccgggaaccgaatatacaatttatgtcattgccctgaagaataatcagaagagcgagcccctgattggaaggaaaaagacagttcaaaagacccctttcgtcacccaccctgggtatgacactggaaatggtattcagcttcctggcacttctggtcagcaacccagtgttgggcaacaaatgatctttgaggaacatggttttaggcggaccacaccgcccacaacggccacccccataaggcataggccaagaccatacccgccgaatgtaggacaagaagctctctctcagacaaccatctcatgggccccattccaggacacttctgagtacatcatttcatgtcatcctgttggcactgatgaagaacccttacagttcagggttcctggaacttctaccagtgccactctgacaggcctcaccagaggtgccacctacaacatcatagtggaggcactgaaagaccagcagaggcataaggttcgggaagaggttgttaccgtgggcaactctgtcaacgaaggcttgaaccaacctacggatgactcgtgctttgacccctacacagtttcccattatgccgttggagatgagtgggaacgaatgtctgaatcaggctttaaactgttgtgccagtgcttaggctttggaagtggtcatttcagatgtgattcatctagatggtgccatgacaatggtgtgaactacaagattggagagaagtgggaccgtcagggagaaaatggccagatgatgagctgcacatgtcttgggaacggaaaaggagaattcaagtgtgaccctcatgaggcaacgtgttatgatgatgggaagacataccacgtaggagaacagtggcagaaggaatatctcggtgccatttgctcctgcacatgctttggaggccagcggggctggcgctgtgacaactgccgcagacctgggggtgaacccagtcccgaaggcactactggccagtcctacaaccagtattctcagagataccatcagagaacaaacactaatgttaattgcccaattgagtgcttcatgcctttagatgtacaggctgacagagaagattcccgagagtaaatcatctttccaatccagaggaacaagcatgtctctctgccaagatccatctaaactggagtgatgttagcagacccagcttagagttcttctttctttcttaagccctttgctctggaggaagttctccagcttcagctcaactcacagcttctccaagcatcaccctgggagtttcctgagggttttctcataaatgagggctgcacattgcctgttctgcttcgaagtattcaataccgctcagtattttaaatgaagtgattctaagatttggtttgggatcaataggaaagcatatgcagccaaccaagatgcaaatgttttgaaatgatatgaccaaaattttaagtaggaaagtcacccaaacacttctgctttcacttaagtgtctggcccgcaatactgtaggaacaagcatgatcttgttactgtgatattttaaatatccacagtactcactttttccaaatgatcctagtaattgcctagaaatatctttctcttacctgttatttatcaatttttcccagtatttttatacggaaaaaattgtattgaaaacacttagtatgcagttgataagaggaatttggtataattatggtgggtgattattttttatactgtatgtgccaaagctttactactgtggaaagacaactgttttaataaaagatttacattccacaacttgaagttcatctatttgatataagacaccttcgggggaaataattcctgtgaatattctttttcaattcagcaaacatttgaaaatctatgatgtgcaagtctaattgttgatttcagtacaagattttctaaatcagttgctacaaaaactgattggtttttgtcacttcatctcttcactaatggagatagctttacactttctgctttaatagatttaagtggaccccaatatttattaaaattgctagtttaccgttcagaagtataatagaaataatctttagttgctcttttctaaccattgtaattcttcccttcttccctccacctttccttcattgaataaacctctgttcaaagagattgcctgcaagggaaataaaaatgactaagatattaaaaaaaaaaaaaaaaaa

SEQ ID NO: 178 - protein, 2330 aa, Homo sapiens
MLRGPGPGLLLLAVQCLGTAVPSTGASKSKRQAQQMVQPQSPVAVSQSKPGCYDNGKHYQINQQWERTYLGNALVCTCYGGSRGFNCESKPEAEETCFDKYTGNTYRVGDTYERPKDSMIWDCTCIGAGRGRISCTIANRCHEGGQSYKIGDTWRRPHETGGYMLECVCLGNGKGEWTCKPIAEKCFDHAAGTSYVVGETWEKPYQGWMMVDCTCLGEGSGRITCTSRNRCNDQDTRTSYRIGDTWSKKDNRGNLLQCICTGNGRGEWKCERHTSVQTTSSGSGPFTDVRAAVYQPQPHPQPPPYGHCVTDSGVVYSVGMQWLKTQGNKQMLCTCLGNGVSCQETAVTQTYGGNSNGEPCVLPFTYNGRTFYSCTTEGRQDGHLWCSTTSNYEQDQKYSFCTDHTVLVQTRGGNSNGALCHFPFLYNNHNYTDCTSEGRRDNMKWCGTTQNYDADQKFGFCPMAAHEEICTTNEGVMYRIGDQWDKQHDMGHMMRCTCVGNGRGEWTCIAYSQLRDQCIVDDITYNVNDTFHKRHEEGHMLNCTCFGQGRGRWKCDPVDQCQDSETGTFYQIGDSWEKYVHGVRYQCYCYGRGIGEWHCQPLQTYPSSSGPVEVFITETPSQPNSHPIQWNAPQPSHISKYILRWRPKNSVGRWKEATIPGHLNSYTIKGLKPGVVYEGQLISIQQYGHQEVTRFDFTTTSTSTPVTSNTVTGETTPFSPLVATSESVTEITASSFVVSWVSASDTVSGFRVEYELSEEGDEPQYLDLPSTATSVNIPDLLPGRKYIVNVYQISEDGEQSLILSTSQTTAPDAPPDPTVDQVDDTSIVVRWSRPQAPITGYRIVYSPSVEGSSTELNLPETANSVTLSDLQPGVQYNITIYAVEENQESTPVVIQQETTGTPRSDTVPSPRDLQFVEVTDVKVTIMWTPPESAVTGYRVDVIPVNLPGEHGQRLPISRNTFAEVTGLSPGVTYYFKVFAVSHGRESKPLTAQQTTKLDAPTNLQFVNETDSTVLVRWTPPRAQITGYRLTVGLTRRGQPRQYNVGPSVSKYPLRNLQPASEYTVSLVAIKGNQESPKATGVFTTLQPGSSIPPYNTEVTETTIVITWTPAPRIGFKLGVRPSQGGEAPREVTSDSGSIVVSGLTPGVEYVYTIQVLRDGQERDAPIVNKVVTPLSPPTNLHLEANPDTGVLTVSWERSTTPDITGYRITTTPTNGQQGNSLEEVVHADQSSCTFDNLSPGLEYNVSVYTVKDDKESVPISDTIIPAVPPPTDLRFTNIGPDTMRVTWAPPPSIDLTNFLVRYSPVKNEEDVAELSISPSDNAVVLTNLLPGTEYVVSVSSVYEQHESTPLRGRQKTGLDSPTGIDFSDITANSFTVHWIAPRATITGYRIRHHPEHFSGRPREDRVPHSRNSITLTNLTPGTEYVVSIVALNGREESPLLIGQQSTVSDVPRDLEVVAATPTSLLISWDAPAVTVRYYRITYGETGGNSPVQEFTVPGSKSTATISGLKPGVDYTITVYAVTGRGDSPASSKPISINYRTEIDKPSQMQVTDVQDNSISVKWLPSSSPVTGYRVTTTPKNGPGPTKTKTAGPDQTEMTIEGLQPTVEYVVSVYAQNPSGESQPLVQTAVTNIDRPKGLAFTDVDVDSIKIAWESPQGQVSRYRVTYSSPEDGIHELFPAPDGEEDTAELQGLRPGSEYTVSVVALHDDMESQPLIGTQSTAIPAPTDLKFTQVTPTSLSAQWTPPNVQLTGYRVRVTPKEKTGPMKEINLAPDSSSVVVSGLMVATKYEVSVYALKDTLTSRPAQGVVTTLENVSPPRRARVTDATETTITISWRTKTETITGFQVDAVPANGQTPIQRTIKPDVRSYTITGLQPGTDYKIYLYTLNDNARSSPVVIDASTAIDAPSNLRFLATTPNSLLVSWQPPRARITGYIIKYEKPGSPPREVVPRPRPGVTEATITGLEPGTEYTIYVIALKNNQKSEPLIGRKKTVQKTPFVTHPGYDTGNGIQLPGTSGQQPSVGQQMIFEEHGFRRTTPPTTATPIRHRPRPYPPNVGQEALSQTTISWAPFQDTSEYIISCHPVGTDEEPLQFRVPGTSTSATLTGLTRGATYNIIVEALKDQQRHKVREEVVTVGNSVNEGLNQPTDDSCFDPYTVSHYAVGDEWERMSESGFKLLCQCLGFGSGHFRCDSSRWCHDNGVNYKIGEKWDRQGENGQMMSCTCLGNGKGEFKCDPHEATCYDDGKTYHVGEQWQKEYLGAICSCTCFGGQRGWRCDNCRRPGGEPSPEGTTGQSYNQYSQRYHQRTNTNVNCPIECFMPLDVQADREDSRE

SEQ ID NO: 179 - DNA, 8815 bp, Homo sapiens
gcccgcgccggctgtgctgcacagggggaggagagggaaccccaggcgcgagcgggaagaggggacctgcagccacaacttctctggtcctctgcatcccttctgtccctccacccgtccccttccccaccctctggcccccaccttcttggaggcgacaacccccgggaggcattagaagggatttttcccgcaggttgcgaagggaagcaaacttggtggcaacttgcctcccggtgcgggcgtctctcccccaccgtctcaacatgcttaggggtccggggcccgggctgctgctgctggccgtccagtgcctggggacagcggtgccctccacgggagcctcgaagagcaagaggcaggctcagcaaatggttcagccccagtccccggtggctgtcagtcaaagcaagcccggttgttatgacaatggaaaacactatcagataaatcaacagtgggagcggacctacctaggcaatgcgttggtttgtacttgttatggaggaagccgaggttttaactgcgagagtaaacctgaagctgaagagacttgctttgacaagtacactgggaacacttaccgagtgggtgacacttatgagcgtcctaaagactccatgatctgggactgtacctgcatcggggctgggcgagggagaataagctgtaccatcgcaaaccgctgccatgaagggggtcagtcctacaagattggtgacacctggaggagaccacatgagactggtggttacatgttagagtgtgtgtgtcttggtaatggaaaaggagaatggacctgcaagcccatagctgagaagtgttttgatcatgctgctgggacttcctatgtggtcggagaaacgtgggagaagccctaccaaggctggatgatggtagattgtacttgcctgggagaaggcagcggacgcatcacttgcacttctagaaatagatgcaacgatcaggacacaaggacatcctatagaattggagacacctggagcaagaaggataatcgaggaaacctgctccagtgcatctgcacaggcaacggccgaggagagtggaagtgtgagaggcacacctctgtgcagaccacatcgagcggatctggccccttcaccgatgttcgtgcagctgtttaccaaccgcagcctcacccccagcctcctccctatggccactgtgtcacagacagtggtgtggtctactctgtggggatgcagtggctgaagacacaaggaaataagcaaatgctttgcacgtgcctgggcaacggagtcagctgccaagagacagctgtaacccagacttacggtggcaactcaaatggagagccatgtgtcttaccattcacctacaatggcaggacgttctactcctgcaccacagaagggcgacaggacggacatctttggtgcagcacaacttcgaattatgagcaggaccagaaatactctttctgcacagaccacactgttttggttcagactcgaggaggaaattccaatggtgccttgtgccacttccccttcctatacaacaaccacaattacactgattgcacttctgagggcagaagagacaacatgaagtggtgtgggaccacacagaactatgatgccgaccagaagtttgggttctgccccatggctgcccacgaggaaatctgcacaaccaatgaaggggtcatgtaccgcattggagatcagtgggataagcagcatgacatgggtcacatgatgaggtgcacgtgtgttgggaatggtcgtggggaatggacatgcattgcctactcgcagcttcgagatcagtgcattgttgatgacatcacttacaatgtgaacgacacattccacaagcgtcatgaagaggggcacatgctgaactgtacatgcttcggtcagggtcggggcaggtggaagtgtgatcccgtcgaccaatgccaggattcagagactgggacgttttatcaaattggagattcatgggagaagtatgtgcatggtgtcagataccagtgctactgctatggccgtggcattggggagtggcattgccaacctttacagacctatccaagctcaagtggtcctgtcgaagtatttatcactgagactccgagtcagcccaactcccaccccatccagtggaatgcaccacagccatctcacatttccaagtacattctcaggtggagacctaaaaattctgtaggccgttggaaggaagctaccataccaggccacttaaactcctacaccatcaaaggcctgaagcctggtgtggtatacgagggccagctcatcagcatccagcagtacggccaccaagaagtgactcgctttgacttcaccaccaccagcaccagcacacctgtgaccagcaacaccgtgacaggagagacgactcccttttctcctcttgtggccacttctgaatctgtgaccgaaatcacagccagtagctttgtggtctcctgggtctcagcttccgacaccgtgtcgggattccgggtggaatatgagctgagtgaggagggagatgagccacagtacctggatcttccaagcacagccacttctgtgaacatccctgacctgcttcctggccgaaaatacattgtaaatgtctatcagatatctgaggatggggagcagagtttgatcctgtctacttcacaaacaacagcgcctgatgcccctcctgacccgactgtggaccaagttgatgacacctcaattgttgttcgctggagcagaccccaggctcccatcacagggtacagaatagtctattcgccatcagtagaaggtagcagcacagaactcaaccttcctgaaactgcaaactccgtcaccctcagtgacttgcaacctggtgttcagtataacatcactatctatgctgtggaagaaaatcaagaaagtacacctgttgtcattcaacaagaaaccactggcaccccacgctcagatacagtgccctctcccagggacctgcagtttgtggaagtgacagacgtgaaggtcaccatcatgtggacaccgcctgagagtgcagtgaccggctaccgtgtggatgtgatccccgtcaacctgcctggcgagcacgggcagaggctgcccatcagcaggaacacctttgcagaagtcaccgggctgtcccctggggtcacctattacttcaaagtctttgcagtgagccatgggagggagagcaagcctctgactgctcaacagacaaccaaactggatgctcccactaacctccagtttgtcaatgaaactgattctactgtcctggtgagatggactccacctcgggcccagataacaggataccgactgaccgtgggccttacccgaagaggacagcccaggcagtacaatgtgggtccctctgtctccaagtacccactgaggaatctgcagcctgcatctgagtacaccgtatccctcgtggccataaagggcaaccaagagagccccaaagccactggagtctttaccacactgcagcctgggagctctattccaccttacaacaccgaggtgactgagaccaccattgtgatcacatggacgcctgctccaagaattggttttaagctgggtgtacgaccaagccagggaggagaggcaccacgagaagtgacttcagactcaggaagcatcgttgtgtccggcttgactccaggagtagaatacgtctacaccatccaagtcctgagagatggacaggaaagagatgcgccaattgtaaacaaagtggtgacaccattgtctccaccaacaaacttgcatctggaggcaaaccctgacactggagtgctcacagtctcctgggagaggagcaccaccccagacattactggttatagaattaccacaacccctacaaacggccagcagggaaattctttggaagaagtggtccatgctgatcagagctcctgcacttttgataacctgagtcccggcctggagtacaatgtcagtgtttacactgtcaaggatgacaaggaaagtgtccctatctctgataccatcatcccagaggtgccccaactcactgacctaagctttgttgatataaccgattcaagcatcggcctgaggtggaccccgctaaactcttccaccattattgggtaccgcatcacagtagttgcggcaggagaaggtatccctatttttgaagattttgtggactcctcagtaggatactacacagtcacagggctggagccgggcattgactatgatatcagcgttatcactctcattaatggcggcgagagtgcccctactacactgacacaacaaacggctgttcctcctcccactgacctgcgattcaccaacattggtccagacaccatgcgtgtcacctgggctccacccccatccattgatttaaccaacttcctggtgcgttactcacctgtgaaaaatgaggaagatgttgcagagttgtcaatttctccttcagacaatgcagtggtcttaacaaatctcctgcctggtacagaatatgtagtgagtgtctccagtgtctacgaacaacatgagagcacacctcttagaggaagacagaaaacaggtcttgattccccaactggcattgacttttctgatattactgccaactcttttactgtgcactggattgctcctcgagccaccatcactggctacaggatccgccatcatcccgagcacttcagtgggagacctcgagaagatcgggtgccccactctcggaattccatcaccctcaccaacctcactccaggcacagagtatgtggtcagcatcgttgctcttaatggcagagaggaaagtcccttattgattggccaacaatcaacagtttctgatgttccgagggacctggaagttgttgctgcgacccccaccagcctactgatcagctgggatgctcctgctgtcacagtgagatattacaggatcacttacggagagacaggaggaaatagccctgtccaggagttcactgtgcctgggagcaagtctacagctaccatcagcggccttaaacctggagttgattataccatcactgtgtatgctgtcactggccgtggagacagccccgcaagcagcaagccaatttccattaattaccgaacagaaattgacaaaccatcccagatgcaagtgaccgatgttcaggacaacagcattagtgtcaagtggctgccttcaagttcccctgttactggttacagagtaaccaccactcccaaaaatggaccaggaccaacaaaaactaaaactgcaggtccagatcaaacagaaatgactattgaaggcttgcagcccacagtggagtatgtggttagtgtctatgctcagaatccaagcggagagagtcagcctctggttcagactgcagtaaccaacattgatcgccctaaaggactggcattcactgatgtggatgtcgattccatcaaaattgcttgggaaagcccacaggggcaagtttccaggtacagggtgacctactcgagccctgaggatggaatccatgagctattccctgcacctgatggtgaagaagacactgcagagctgcaaggcctcagaccgggttctgagtacacagtcagtgtggttgccttgcacgatgatatggagagccagcccctgattggaacccagtccacagctattcctgcaccaactgacctgaagttcactcaggtcacacccacaagcctgagcgcccagtggacaccacccaatgttcagctcactggatatcgagtgcgggtgacccccaaggagaagaccggaccaatgaaagaaatcaaccttgctcctgacagctcatccgtggttgtatcaggacttatggtggccaccaaatatgaagtgagtgtctatgctcttaaggacactttgacaagcagaccagctcagggagttgtcaccactctggagaatgtcagcccaccaagaagggctcgtgtgacagatgctactgagaccaccatcaccattagctggagaaccaagactgagacgatcactggcttccaagttgatgccgttccagccaatggccagactccaatccagagaaccatcaagccagatgtcagaagctacaccatcacaggtttacaaccaggcactgactacaagatctacctgtacaccttgaatgacaatgctcggagctcccctgtggtcatcgacgcctccactgccattgatgcaccatccaacctgcgtttcctggccaccacacccaattccttgctggtatcatggcagccgccacgtgccaggattaccggctacatcatcaagtatgagaagcctgggtctcctcccagagaagtggtccctcggccccgccctggtgtcacagaggctactattactggcctggaaccgggaaccgaatatacaatttatgtcattgccctgaagaataatcagaagagcgagcccctgattggaaggaaaaagacagacgagcttccccaactggtaacccttccacaccccaatcttcatggaccagagatcttggatgttccttccacagttcaaaagacccctttcgtcacccaccctgggtatgacactggaaatggtattcagcttcctggcacttctggtcagcaacccagtgttgggcaacaaatgatctttgaggaacatggttttaggcggaccacaccgcccacaacggccacccccataaggcataggccaagaccatacccgccgaatgtaggtgaggaaatccaaattggtcacatccccagggaagatgtagactatcacctgtacccacacggtccgggactcaatccaaatgcctctacaggacaagaagctctctctcagacaaccatctcatgggccccattccaggacacttctgagtacatcatttcatgtcatcctgttggcactgatgaagaacccttacagttcagggttcctggaacttctaccagtgccactctgacaggcctcaccagaggtgccacctacaacatcatagtggaggcactgaaagaccagcagaggcataaggttcgggaagaggttgttaccgtgggcaactctgtcaacgaaggcttgaaccaacctacggatgactcgtgctttgacccctacacagtttcccattatgccgttggagatgagtgggaacgaatgtctgaatcaggctttaaactgttgtgccagtgcttaggctttggaagtggtcatttcagatgtgattcatctagatggtgccatgacaatggtgtgaactacaagattggagagaagtgggaccgtcagggagaaaatggccagatgatgagctgcacatgtcttgggaacggaaaaggagaattcaagtgtgaccctcatgaggcaacgtgttatgatgatgggaagacataccacgtaggagaacagtggcagaaggaatatctcggtgccatttgctcctgcacatgctttggaggccagcggggctggcgctgtgacaactgccgcagacctgggggtgaacccagtcccgaaggcactactggccagtcctacaaccagtattctcagagataccatcagagaacaaacactaatgttaattgcccaattgagtgcttcatgcctttagatgtacaggctgacagagaagattcccgagagtaaatcatctttccaatccagaggaacaagcatgtctctctgccaagatccatctaaactggagtgatgttagcagacccagcttagagttcttctttctttcttaagccctttgctctggaggaagttctccagcttcagctcaactcacagcttctccaagcatcaccctgggagtttcctgagggttttctcataaatgagggctgcacattgcctgttctgcttcgaagtattcaataccgctcagtattttaaatgaagtgattctaagatttggtttgggatcaataggaaagcatatgcagccaaccaagatgcaaatgttttgaaatgatatgaccaaaattttaagtaggaaagtcacccaaacacttctgctttcacttaagtgtctggcccgcaatactgtaggaacaagcatgatcttgttactgtgatattttaaatatccacagtactcactttttccaaatgatcctagtaattgcctagaaatatctttctcttacctgttatttatcaatttttcccagtatttttatacggaaaaaattgtattgaaaacacttagtatgcagttgataagaggaatttggtataattatggtgggtgattattttttatactgtatgtgccaaagctttactactgtggaaagacaactgttttaataaaagatttacattccacaacttgaagttcatctatttgatataagacaccttcgggggaaataattcctgtgaatattctttttcaattcagcaaacatttgaaaatctatgatgtgcaagtctaattgttgatttcagtacaagattttctaaatcagttgctacaaaaactgattggtttttgtcacttcatctcttcactaatggagatagctttacactttctgctttaatagatttaagtggaccccaatatttattaaaattgctagtttaccgttcagaagtataatagaaataatctttagttgctcttttctaaccattgtaattcttcccttcttccctccacctttccttcattgaataaacctctgttcaaagagattgcctgcaagggaaataaaaatgactaagatattaaaaaaaaaaaaaaaaaa

SEQ ID NO: 180 - protein, 2477 aa, Homo sapiens
MLRGPGPGLLLLAVQCLGTAVPSTGASKSKRQAQQMVQPQSPVAVSQSKPGCYDNGKHYQINQQWERTYLGNALVCTCYGGSRGFNCESKPEAEETCFDKYTGNTYRVGDTYERPKDSMIWDCTCIGAGRGRISCTIANRCHEGGQSYKIGDTWRRPHETGGYMLECVCLGNGKGEWTCKPIAEKCFDHAAGTSYVVGETWEKPYQGWMMVDCTCLGEGSGRITCTSRNRCNDQDTRTSYRIGDTWSKKDNRGNLLQCICTGNGRGEWKCERHTSVQTTSSGSGPFTDVRAAVYQPQPHPQPPPYGHCVTDSGVVYSVGMQWLKTQGNKQMLCTCLGNGVSCQETAVTQTYGGNSNGEPCVLPFTYNGRTFYSCTTEGRQDGHLWCSTTSNYEQDQKYSFCTDHTVLVQTRGGNSNGALCHFPFLYNNHNYTDCTSEGRRDNMKWCGTTQNYDADQKFGFCPMAAHEEICTTNEGVMYRIGDQWDKQHDMGHMMRCTCVGNGRGEWTCIAYSQLRDQCIVDDITYNVNDTFHKRHEEGHMLNCTCFGQGRGRWKCDPVDQCQDSETGTFYQIGDSWEKYVHGVRYQCYCYGRGIGEWHCQPLQTYPSSSGPVEVFITETPSQPNSHPIQWNAPQPSHISKYILRWRPKNSVGRWKEATIPGHLNSYTIKGLKPGVVYEGQLISIQQYGHQEVTRFDFTTTSTSTPVTSNTVTGETTPFSPLVATSESVTEITASSFVVSWVSASDTVSGFRVEYELSEEGDEPQYLDLPSTATSVNIPDLLPGRKYIVNVYQISEDGEQSLILSTSQTTAPDAPPDPTVDQVDDTSIVVRWSRPQAPITGYRIVYSPSVEGSSTELNLPETANSVTLSDLQPGVQYNITIYAVEENQESTPVVIQQETTGTPRSDTVPSPRDLQFVEVTDVKVTIMWTPPESAVTGYRVDVIPVNLPGEHGQRLPISRNTFAEVTGLSPGVTYYFKVFAVSHGRESKPLTAQQTTKLDAPTNLQFVNETDSTVLVRWTPPRAQITGYRLTVGLTRRGQPRQYNVGPSVSKYPLRNLQPASEYTVSLVAIKGNQESPKATGVFTTLQPGSSIPPYNTEVTETTIVITWTPAPRIGFKLGVRPSQGGEAPREVTSDSGSIVVSGLTPGVEYVYTIQVLRDGQERDAPIVNKVVTPLSPPTNLHLEANPDTGVLTVSWERSTTPDITGYRITTTPTNGQQGNSLEEVVHADQSSCTFDNLSPGLEYNVSVYTVKDDKESVPISDTIIPEVPQLTDLSFVDITDSSIGLRWTPLNSSTIIGYRITVVAAGEGIPIFEDFVDSSVGYYTVTGLEPGIDYDISVITLINGGESAPTTLTQQTAVPPPTDLRFTNIGPDTMRVTWAPPPSIDLTNFLVRYSPVKNEEDVAELSISPSDNAVVLTNLLPGTEYVVSVSSVYEQHESTPLRGRQKTGLDSPTGIDFSDITANSFTVHWIAPRATITGYRIRHHPEHFSGRPREDRVPHSRNSITLTNLTPGTEYVVSIVALNGREESPLLIGQQSTVSDVPRDLEVVAATPTSLLISWDAPAVTVRYYRITYGETGGNSPVQEFTVPGSKSTATISGLKPGVDYTITVYAVTGRGDSPASSKPISINYRTEIDKPSQMQVTDVQDNSISVKWLPSSSPVTGYRVTTTPKNGPGPTKTKTAGPDQTEMTIEGLQPTVEYVVSVYAQNPSGESQPLVQTAVTNIDRPKGLAFTDVDVDSIKIAWESPQGQVSRYRVTYSSPEDGIHELFPAPDGEEDTAELQGLRPGSEYTVSVVALHDDMESQPLIGTQSTAIPAPTDLKFTQVTPTSLSAQWTPPNVQLTGYRVRVTPKEKTGPMKEINLAPDSSSVVVSGLMVATKYEVSVYALKDTLTSRPAQGVVTTLENVSPPRRARVTDATETTITISWRTKTETITGFQVDAVPANGQTPIQRTIKPDVRSYTITGLQPGTDYKIYLYTLNDNARSSPVVIDASTAIDAPSNLRFLATTPNSLLVSWQPPRARITGYIIKYEKPGSPPREVVPRPRPGVTEATITGLEPGTEYTIYVIALKNNQKSEPLIGRKKTDELPQLVTLPHPNLHGPEILDVPSTVQKTPFVTHPGYDTGNGIQLPGTSGQQPSVGQQMIFEEHGFRRTTPPTTATPIRHRPRPYPPNVGEEIQIGHIPREDVDYHLYPHGPGLNPNASTGQEALSQTTISWAPFQDTSEYIISCHPVGTDEEPLQFRVPGTSTSATLTGLTRGATYNIIVEALKDQQRHKVREEVVTVGNSVNEGLNQPTDDSCFDPYTVSHYAVGDEWERMSESGFKLLCQCLGFGSGHFRCDSSRWCHDNGVNYKIGEKWDRQGENGQMMSCTCLGNGKGEFKCDPHEATCYDDGKTYHVGEQWQKEYLGAICSCTCFGGQRGWRCDNCRRPGGEPSPEGTTGQSYNQYSQRYHQRTNTNVNCPIECFMPLDVQADREDSRE

SEQ ID NO: 181 - DNA, 2550 bp, Bos taurus
tgggcggaacccaacggacgagcgtgcggccgcggcgctaccaactcgtgtgggacccaccgctcccgccggccgcccgccggtccgcgcgccggtcctcccgccggcagccgagcccgcccgcgagccgcccgtgccctcgcgaggctggcatgcaggatggcaggacagcccagccacatgccccatggagggaacccaaacaacctctgccacaccctggggcccgcgcaccctcctgacccacagaggcaccccaacgccctgtcttttcgctgctcactggccgacttccagattgagaagaagattggccgagggcagttcagtgaggtgtacaaggccacctgcttgctggacaggaagacagtggctctgaagaaggtgcagatatttgagatgatggacgccaaggccaggcaggactgtgtcaaggagattggcctcctgaagcaactgaaccatccaaacatcatcaagtatttggattcattcatcgaggacaatgaactgaacattgtgctggagctggcggacgcgggcgacctatcacagatgatcaagtacttcaagaagcagaagcggctcatcccggagaggaccgtgtggaagtacttcgtgcagctctgcagtgccgtggagcacatgcactcccgccgggtcatgcaccgcgacatcaagcctgccaacgtgttcatcacggccacgggcatcgtgaagctgggcgacctcggcctgggccgcttcttcagctcagagaccaccgcggcccactccctagtggggacgccgtactacatgtcaccagagaggatccatgagaacggctataacttcaagtctgacatctggtctctgggctgtttgctgtacgagatggcagctcttcagagccccttctatggagacaaaatgaatctcttctccctctgccagaagatcgagcagtgtgactacccgcctctccccggggaacattactctgagaagttacgagaactggtcagcatgtgtatccaccctgaccccaaccagagacccgacatcacctatgtgcaccagattgccaaacagatgcacgtgtggacttcaagcacctgagcgtggatgcagcgtgccttctcagaagccacaccttacctgccttacctgagtcttctccaaagtggccacctggtagctgggaccaactaagactagagggttcagcacgttccccaaagaggggcccaggcttcatagcagatgctgaatacagggctgctggggggaggggcactggtcatgtgttactggtggtcacatttgaaactcctttctttaaactgttgtgaacactctcagctgggttgccaggggtggatggttcagtgagccactgacacaccccttatatctggactgtaatgtgaatctttcggataattccttcagtgacctgtcaaggtttgtaataacaggagaatacaggagactctgatttgtagtgagcctttttaaatggatagtggcaagtttagctcttagaatcttttcaaacaatcaagctgtgtgcttaatttactctcttgtaagggaagaaagtggaaatatttttttttaagtagagtggagattttcctaatatttttctctatgtttataacttgataaatgacgacgaggtgaacctagcatctgacatagaggcaaacagtatttgaaagccatgagtgttctctgtgcagtcggctcagccctcttctgaacacccgccagcaccaggccctcatcaccggcttgaatgctggcggttcgtttaatgatcagtgtgaagtgttttcctccctgagaaggaagcataggaaataaaaatatacgggctttgcactggttctgcaccttcctggcatgaccctgggcaagcttcttaacctctctgagactgttgcctcatctacaaaatggacttaatagcatctatcttcagggttgctgacagaatttgagataaaatatgtaaatttatctagctcatggcagatgatccaaaaatggtagctactcaccccttcacaaagctgaaatccacggaccatgcaagtcaagagttaaacgtacaactgtattatttgtagaaaaccagaagtgtgttcatttatttcttactcccaaataggattaactgtgaagattaatttataaatgtgaacttaagggaaactgaagctctgaaggaagtagtttgaattttgtttttacactcaagttaatcctcaaatggtctaatcgtcactcactaacttggtgacagttcagccctccagacaagacagcgcatgtgtccgccccactggtgtcctggtcaggcctctatgggggcaaaggatttgggtctggccagtgtgccgatttcttgtgtgaactctgttctactgtaatactgtcgcgtttgagagattttcttcagatgcagcctctgctttgtactcatcctccatggttgaaataaaatgggtaagagggaaaaaaaaaaaaaaaaaaaaaaaaaaaaaaaaaaaaaaaaaaaaa

SEQ ID NO: 182 - protein, 253 aa, Bos taurus
KATCLLDRKTVALKKVQIFEMMDAKARQDCVKEIGLLKQLNHPNIIKYLDSFIEDNELNIVLELADAGDLSQMIKYFKKQKRLIPERTVWKYFVQLCSAVEHMHSRRVMHRDIKPANVFITATGIVKLGDLGLGRFFSSETTAAHSLVGTPYYMSPERIHENGYNFKSDIWSLGCLLYEMAALQSPFYGDKMNLFSLCQKIEQCDYPPLPGEHYSEKLRELVSMCIHPDPNQRPDITYVHQIAKQMHVWTSST

SEQ ID NO: 183 - DNA, 882 bp, Bos taurus
ggcagagcccgagcaggcagcccagtctggtgctgagagagccatgaccgcgctacgggggctctggcccgagatgcaggatacctgcacctcgctggggctgatgctgtcgatcgtgctgttcacggggctagcccgcgtggtcacccggcagcagctgaacggacccatggcccacgccttcgtcttggagtttctggccaccttccagctctgcttctgcactcatgagttacaactgctgagtgagcaggaacccctgcaccccacctggccgctgacgctaatctacttcttctcaatggtgcatggcctgactctggtgggcacctccagcaacccgtgcggcgtgatgatgcagataatgctggggggaatgtccgctgagacgggtgcgattagactgttagctcagctgattggtgccctgtgcagcaggtactgcatgagcgccctgtggagcctggggctgaccaagtatcacgtcagcgagaggagcttcgcttgcaggaatcccattcaagtggacttgcccaaagcggtcatcatagaggctgtctgctcctttattttccacagcgctttgctgcacttccaggaggtccgaaccaagcttcgtatccacctgctgtcagcactcatcacctttttggtttatgcaggaggaagtctaacaggagctgtatttaatccaactttggcactttcactgcatttcaagtgttttgatgaagcattccttcaattttttatagtatattggctgtctccttctttaggtatattgctgatgattgtgatgttcaatttttttccttccatggctgtatgacaaccacacaactaataaaaaggagtaactattcaaaaaaaaaaaaaaaa

SEQ ID NO: 184 - protein, 262 aa, Bos taurus
MTALRGLWPEMQDTCTSLGLMLSIVLFTGLARVVTRQQLNGPMAHAFVLEFLATFQLCFCTHELQLLSEQEPLHPTWPLTLIYFFSMVHGLTLVGTSSNPCGVMMQIMLGGMSAETGAIRLLAQLIGALCSRYCMSALWSLGLTKYHVSERSFACRNPIQVDLPKAVIIEAVCSFIFHSALLHFQEVRTKLRIHLLSALITFLVYAGGSLTGAVFNPTLALSLHFKCFDEAFLQFFIVYWLSPSLGILLMIVMFNFFPSMAV

SEQ ID NO: 185 - DNA, 2349 bp, Bos taurus
caaccttgttgctgattcccagctcaggccttttttcatcccgacctggaggttgcttcgcgagcgcgggacgcagctgacgcccgctaaacggctttctttgcgcggccccagctcggaagccagttggcgtcggcaacagagacgagaagcccacaaggcaagagttaattgtgagttggcggcaaccttgctgaagatgaagaatatacattagaggaggagatttttttctttcacgtcttgattgcttggtgacttgcctctgggtaccatttttcagttgagtctgtgtggttcctcagaaatggtttttacaatctcaagaaaatctatgtcccagaaattgagtttactcttgcttgtatttggactcctttggggattgatgttactgcactatatttttcaacgaccaagacatcaaagcagtgtcaagttacgtgagcagatactagatttaagcaaaaaatatgttaaagccctagcagaggaaaataagaacacaatggatgtcgagaatggcgcttctatggcaggatatgcggatctaagaagaacaattgctgtccttttggatgacattttacaacgtttggtaaagctggagaacaaagtcgactatattgttgtgaacggctcagcagctagcactaccagtggtactagtgggaacccagtgccactgaccacaaataaaagggtaaaagcatcaggcagcattagatagcagtggaagatcacctcgtgctgctacattcaccatggattatatcctatggcagaaaatcactggctagcatagagtaatactttacaataaaagctctgcgcattttcaaggaatatgctggattcatggaactttaattctgtatataatttaaaagttattagtttgctttcaggcacatctcttcaatgctgtactatagccttaaagggaatttggtaacatggttgatgtagtaagcaggtaggtgatctttgtataaatctttgtgtttgagaccaagttgaaacaaaaacactgaaagacggattcatttctacaaaatatttatttaaatatataacattttttagacaaatgaggaatattgttattgaatcgttttgtcatttgttatggatagatgtgaatgttggactaatactattagaaaatgtgcttacttccagtacttactatattttgttattcagattatgagcagagagaaaggaagtataatattgaaaatagtgttttgaaatgatgacccaaagaatgtcttcatttgcactatcccttcagaataactgaaggttaattattgtatattaaaaaaaattacatttgtaagagtataatcttgaaatgggtagtagccactgtttgtaaactattctaaacattggggcaattaaataacattaaaatagtaatctccaatctcatatgtaacattttcttatatacttgtattctgaagagtaaaagatatttttatgatgagattaaatattaattcatgatttttcatatagatgaatgttaatttaaaaatataacactttgattatgctgtcaagaaagcacattatttccatatttgggtaatttttgcttttattatattgacaaggaagcgggaaactgagatatttgtgagactggaactcttaaggactttagccagatgtgtataataaaagtatttgtgttgcattaaattgtttggaaaatgttaacattatagtatatagaatatatactctttatgaaatgttggatttgtatgatatacagtagatattcattttatgtagtgaccatttaaaaataagagcatttaaaatgtaatttaaattatgaagatggactatcttttcaggaaaacagctattctatatatagcacaagagagctcaatcttgggtaattctggtatagagcaaagtacacctttatttaaattttccttgttgcaaatttaattgccatatggtgccctatgtttcatagtatttattctctaagtgcagctagcttctagatttagactgtattgtatttagttttggaaattgtattgttcattattacaatgtgctaccagacgtggtagcaataattatactggtttattaaagtaagtatgagaaaatacttcttgaaggtatctttgcaaactcttccctgtaccctgccattatgtgaagaaattatttacataccgtttccaggtgaagtttggaatagttgttcagtctctcattagatgtgtacattttttgtttttgttttcagggatgaaataaaatgtattatttgtactttaaaaaaaaaaaaaaaaaaaaaaaaaa

SEQ ID NO: 186 - protein, 140 aa, Bos taurus
MVFTISRKSMSQKLSLLLLVFGLLWGLMLLHYIFQRPRHQSSVKLREQILDLSKKYVKALAEENKNTMDVENGASMAGYADLRRTIAVLLDDILQRLVKLENKVDYIVVNGSAASTTSGTSGNPVPLTTNKRVKASGSIR

SEQ ID NO: 187 - DNA, 2406 bp, Bos taurus
gcagtcagtccggtgtttgcaaatattgtgcgggctcgcgagcgcgtctccgggctccggccaggacccgaacccgcggcgcctaatcgctgcgcacttgagtttgcatgaacttccccggcgctgcaggcacggccgccgcgctcccgactgcagaccgcaagcctccctgtttttacagcagcggggacggtctcttccaacccgacatggatgtgctcccaatgtgcagcatcttccaggaactccagattgtgcacgagactggttacttctcggcgctgccctccctggaggaatactggcaacagacctgcctggagttggaacgttacctgcagagcgagccctgctacgtgtcagcctccgagatcaaattcgacagccaggaagatctgtggaccaaaatcatcttggctcgggagaaaaaggaggacgcggacctgaaggtgtcctcctctggcccgcccgaggacgcgctccacagccctggcttcagctacaacctggagaccaacagcctgaactcggatgtgagcagcgagtcctccgacagctccgaggagctctcgcccaccaccaagtttacctccgaccccatcagcgaagtcttggtcaattcggggaatctgagctcctcggtcacctccacgcctccgtcctccccagaactgagcagggagccctcgcacctgtggggctgtgtgcctggcgagctgcacccccccgggaaggcgcggggcgggacctcagggaagccgggcgacaagggcagcggggacgcctcccccgacggccgcaggcgggtgcatcgctgccactttaatggctgcaggaaagtttacaccaaaagctcccacttgaaagcacaccagcgcacccacacaggagaaaagccttacagatgctcatgggaagggtgtgagtggcgttttgcaagaagcgatgagttaaccagacacttcagaaagcacactggtgccaagccttttaaatgttctcactgtgacaggtgtttctccaggtccgaccacctggccctgcacatgaagagacacctctgagggggcagagcgacaactcctgcgggctaaaaaggcttccaggctgagacggccgcggaaggagggtgcgtgttccagccaaagccattttgcaccctgcccggtcacctccaggacctactgggaaggtctttcgagggcgagaacagtcacgtccgaagcggcagggcacccggggtgtgtggtgtctgggtggccctggctcgccactggttacctgtcctctgagtggtccctaagcctttgccgtgagcatgtgcactgagaatgttagtggtgggtgggctgtatgtggagggtctcctacggactgggtaacgaggcacatcctttccctggcgagactgcaagagacagaaaaaaaaaaaacagagtttgaatgttctgtgtgtgaggcgtgttccgtgagacgagatgaccatccttcatttcctgagggggtgtctgcgccttagaggagagaaaaaaaaaaagacaagaagaagggaagatgtggagggcaggcgtgggcagtcaggaccccgagtgacgagtgggtgttggtggggagagccccttcccccgcggtgtgtgacgggagcgttcggtgttcggttcagctgtgtgaagtgagtagctggcgctgcttgctgtgacagagttcatttgttacctgttgtatacgctgtgtacctacaaacataacacgtggataacttttccttctaagacaaaagtaatgcatggtctggggaattatctgcttttccatttttaaatcaggactaccgttttggttccaagttcactgagcagctaagataacaattggtcgaatcaggtgaccccctagccatctgggcctggcaatacatgatgctccaccccccccaactcccgccccttggatttattcgtaacactccccttctagagaggcgttgtgcagtgtaggactattttgtcagtggttccgaattcgtattacctttttggagaatttcaagttgcccttgggagacattgggcacgagttgggtgtccgggacaccaaggctgggaatcgctggtctaacgtcccactagactcagaacctaaaatttttctcagttgggtggatgaaaccactaaagcttagaaactgttttctcatgcagctaagtttctcttatttatgccttgaggactcatttctggttttctagctgttaatgcactgtagatcttaataatggtgccttacgcaagtggcccctcctgtgggggtctcatacaggggaatgggtgatgcatgctttattaaggctcttttttcacctggctttgtactgtatcaatatttaatacagaaaaaaaaaaaaa

SEQ ID NO: 188 - protein, 318 aa, Bos taurus
MNFPGAAGTAAALPTADRKPPCFYSSGDGLFQPDMDVLPMCSIFQELQIVHETGYFSALPSLEEYWQQTCLELERYLQSEPCYVSASEIKFDSQEDLWTKIILAREKKEDADLKVSSSGPPEDALHSPGFSYNLETNSLNSDVSSESSDSSEELSPTTKFTSDPISEVLVNSGNLSSSVTSTPPSSPELSREPSHLWGCVPGELHPPGKARGGTSGKPGDKGSGDASPDGRRRVHRCHFNGCRKVYTKSSHLKAHQRTHTGEKPYRCSWEGCEWRFARSDELTRHFRKHTGAKPFKCSHCDRCFSRSDHLALHMKRHL

SEQ ID NO: 189 - DNA, 2146 bp, Bos taurus
cccaactctagcctgaagcagctctccccaggatgagaaatgctgccctcctcatgaccagggcaacaagccttcgcctcagcctgttgcttctgctttccttcctgccggacctggacggaggtgtgagagccaaggaactgaggtttgtgacattggtttttaggcatggagaccgaagtcctattgaaacctttcctaatgatcccattaaggaatcctcatggccacagggatttggccaactcactcagttgggcatggcacagcattatgaacttggacagtatataaggaaacgttatgaaaactttttgaatgaatcttataagcgtgaacaggttcatgttcgaagcacggatattgaccggactttgatgagtgctatgacaaaccttgcagccctatttcccccagagggtatcagcatctggaatcccagcctaccctggcagcccatcccagtgcacacagtccctgtttctgaagatcagttgctatacctacctttcaggaactgccctcgttttcaagaacttcagagtgagactttgatatcagaagaattccagaagaggctacaaccttataaggattttatagaagtcttgccaaaacttacaggataccatgaccaggatcttcttggaatttggagtaaagtctacgaccctttattttgtgagggtgttcataatttcactttaccttcctgggcaacagaggacaccatgactaagttgaaagaaatatcagaattgtcccttctgtccctctatggaattcataagcagaaagaaaaatctagattgcaggggggtgtcctgatcaatgaaatcctcaatcacatgaagagtgcaactcagccatcaaaccgcagaaaactcattatgtattctgcacatgacactactgtaagtggcctgcagatggcgctagatgtttacaacggaatccttcctccctatgcgtcctgccacatgatggaattgtacttccaggatggagaatacttcgtagagatgtactatcggaatgagacgcgatatgaaccacatcccctcacgctacctggctgcacccccagctgccctttggcgaagtttgttgagctggttgcccccgttatctcccaagactggtccatggagtgtgccataagaaaccataaaggtactgaggacattatcaattagggtgaatgcagagctctgcagagaaggcagaacatcttttttccagatggatggtgctttgagactataaactggcttcacccccatctttgagggaaatagggtttgggtgataattatgtttcagagacctcaacttcaggaaactcctatttcttcactgggctctgcctctacctgccataaaccttgtcaacctatataaaccgaggaagcagtaatcaagcagaaaacatttacttgggatcaaagaattggaattcaggaaacaagcattagactgatcttggagaaacagtagtgaacagtcctgaagagaaatcaactttagttctctgcccaggaattgaacctcggtagcctggatgaaaaccaggaatcctaaccactagaccaacagggactagaggcaatgggtgaaattcccaggctcttcccctcctttgaaagcaagaatgtttcaaggaggcaaaaatttaaaaaacaggtacaaagtttattagcacaaccaatgggagagcacacagagaagtagtttatataagtgagaagctaggcagaaatacggagaaggcaatgacaccccactccagtactcttgcctggaaagtcccatgggcagaggagcctggtaggctgcagtccatggggtcgctaagagttggacatggctgagcgacttccctttcacttttcactttcatgcattggagaaggaaatggcaacccactccagtgttcttgcctggagaatcccagggacggcagagcctggtgggctgccatctatggggtccacagagtcggacacgactgaagtgacttagcagcagcaggcagaaatacacacccacagggaaagggtgtgggagtcctctgtaatgaggaggagcacagtaaagaggtgatttaaatcccttataaaaaaaaaaaaaaaaaaaaaaaaaaaa

SEQ ID NO: 190 - protein, 387 aa, Bos taurus
MRNAALLMTRATSLRLSLLLLLSFLPDLDGGVRAKELRFVTLVFRHGDRSPIETFPNDPIKESSWPQGFGQLTQLGMAQHYELGQYIRKRYENFLNESYKREQVHVRSTDIDRTLMSAMTNLAALFPPEGISIWNPSLPWQPIPVHTVPVSEDQLLYLPFRNCPRFQELQSETLISEEFQKRLQPYKDFIEVLPKLTGYHDQDLLGIWSKVYDPLFCEGVHNFTLPSWATEDTMTKLKEISELSLLSLYGIHKQKEKSRLQGGVLINEILNHMKSATQPSNRRKLIMYSAHDTTVSGLQMALDVYNGILPPYASCHMMELYFQDGEYFVEMYYRNETRYEPHPLTLPGCTPSCPLAKFVELVAPVISQDWSMECAIRNHKGTEDIIN

SEQ ID NO: 191 - DNA, 2191 bp, Bos taurus
gagccgctcagccccctgccccccaaccgcccgccgtctgggccgggccgaggatgcggcgcagcgcctcggcggccaggctctctcccgtccggccagcttgctaacttcctcggctccgtccttgtccgccagcgggggccaccgcgtgtccccgcgtcctccgagtcgggtcctccaggcgcgccgggcgctgcccctgtgtgtctcccgctgccagcccgcgccccgtccccgttcggtcatgctgtccctctgcctcatggccgcgctgctgctggccgccgggcccgggccgagcctgggcgacgaagccatccactgcccgccctgctccgaggagaagctggcgcgctgccgcccccccgtgggctgtgaggagctggtgcgagagccgggctgcggctgttgcgccacttgcgccctgggcaaagggatgccctgtggggtgtacaccccccgctgcggctccggcctgcgctgctacccgccccggggcgtggagaagcccctgcacacgctggtgcacggacaaggcgtgtgcatggagctggcagagatcgaggccatccaggaaagcctgcagccctctgacaaggacgagggcgaccaccccaacaacagcttcagcccctgcagcgcccacgaccgcaagtgcctgcagaagcacttggccaaaattcgagaccggagcaccagtgggggcaagatgaaggtcatcggggcgccccgagaggaagcccggcctgtgccccagggctcctgccagagtgagctgcaccgggcgctggagcggctggccgcctcacagagccgcacccacgaagacctttacatcattcccatccccaactgcgaccgcaacggcaacttccaccccaagcagtgccacccggccctggatgggcagcgcggcaagtgctggtgtgtggaccggaagacgggagtgaagcttccggggggcctggagccgaagggggagctggactgccaccagttggctgacagcttccgagagtgagcctgtcagcaggcagggggctcagtgccccctgctgcccccttccctggaggctgcagagctgacctggagcctaggtctgagtcctggctttgcctctggcccagaagtttccctcggggtgtgtctgtgtgtatgtgtgtgtgcgtgtgtgttaatgagcctgggtatgtgcttggggtgagccaaaccctaggggtgtcctctatgggcttagatagcccaggagagccctggtatgtttccaaattgatcctggattcattcatccattcagcccttcagcccttcagccatctataaacacttcttgaccacatactacatgccagctctagtttgcagccctggggactcatcttgactccctctgatgtagatatgtggggccacctcctgcaaggtgagcccaagtctgtgggagaagagaagtcccagttccataatcggggaggaaaacagacatgtaccttgaccattgtcctcagtctagacagaaggtctagtccctaccatagggaagctgaggggtagcaggagacccactgagacccaatcccaacactgaaacctgccaggctcccctttactcctccccaggtccttccagcgggaggacctgcaagggcaagcccaccttggcttgattgcctggcaactgagaccctgctctggggaagggaagaggtcagaggaagccctgcagagggctggggaggtggggcccatctctgagcaatcagagtaggaggaaagaatgtatgtgcctgatggagaaagggatcggcatgctgggaggtgagggacttatctggggtgctccttcctcctccgtttgtggtcacagacaggaagtcacaggatggcgccatccttcagtggttcactgtctgtggctctgccttcctccccatgtctccttccctggattttcctcccctatatttccctacccctgggcattttttggctcaactggatggacagagacttaggtacctaccagttggccatgatgtcttgtctttttttttttaacaaaacagaacaaaaccaaaaaaaccctaaaaaaaaaaaaaaaaaaaaaaaaaaaaaaaaaaaaaaaaaaaaaaaaaaaaaaaaaaaaaaaaaaaaaaaaaaaaaaaaaaaaaaaaaaaaaaaaaaaaaaaa

SEQ ID NO: 192 - protein, 258 aa, Bos taurus
MLSLCLMAALLLAAGPGPSLGDEAIHCPPCSEEKLARCRPPVGCEELVREPGCGCCATCALGKGMPCGVYTPRCGSGLRCYPPRGVEKPLHTLVHGQGVCMELAEIEAIQESLQPSDKDEGDHPNNSFSPCSAHDRKCLQKHLAKIRDRSTSGGKMKVIGAPREEARPVPQGSCQSELHRALERLAASQSRTHEDLYIIPIPNCDRNGNFHPKQCHPALDGQRGKCWCVDRKTGVKLPGGLEPKGELDCHQLADSFRE

SEQ ID NO: 193 - DNA, 841 bp, Bos taurus
attttctctaaatccctcttctgtttgctaaatctcactgtcactgctaaattcagagcagatagagcctgcgcaatggaataaagtcctcaaaattgaaatgtgacattgctctcaacatctcccatctccctggatttctttttgcctcattattcctgctaaccaattcatttccagactttgcacttcagaagcaatgggaaaaatcagcagtcttccaacccaattatttaagtgctgcttttgtgatttcttgaagcaggtgaagatgcccatcacatcctcctcgcatctcttctatctggccctgtgcttgctcgccttcaccagctctgccacggcgggacccgagaccctctgcggggctgagttggtggatgctctccagttcgtgtgcggagacaggggcttttatttcaacaagcccacggggtatggctcgagcagtcggagggcgccccagacaggaatcgtggatgagtgctgcttccggagctgtgatctgaggaggctggagatgtactgcgcgcctctcaagcccgccaagtcggcccgctcagtccgtgcccagcgccacaccgacatgcccaaggctcagaaggaagtacatttgaagaacacaagtagagggagtgcaggaaacaagaactacagaatgtaggaagaccttcctaaagagtgaagaatgacatgccaccggcaggatccttcgctctgcacgagttacctgttaaacaccagaagacctaccaaaaataagtttgataacatttcaaaagatgggcatttcccccaatgaaataagtaaacattccaacattgaaaaaaaaaaaaaaaa

SEQ ID NO: 194 - protein, 154 aa, Bos taurus
MGKISSLPTQLFKCCFCDFLKQVKMPITSSSHLFYLALCLLAFTSSATAGPETLCGAELVDALQFVCGDRGFYFNKPTGYGSSSRRAPQTGIVDECCFRSCDLRRLEMYCAPLKPAKSARSVRAQRHTDMPKAQKEVHLKNTSRGSAGNKNYRM

SEQ ID NO: 195 - DNA, 4068 bp, Bos taurus
atggcgagccctccggagactgacggcttctcggacgtgcgcaaggtgggctacctgcgcaaacccaagagcatgcacaaacgattcttcgtgctgcgggcggccagcgaggctgggggcccggcgcgcctcgagtactacgagaacgagaagaagtggcggcacaagtctagcgcccccaaacgctcgatccccctggagagctgcttcaacatcaacaagcgggcggactccaagaacaagcacctggtggccctctacacccgggacgagcactttgccatcgcggcagacagcgaggccgagcaggacagctggtaccaggccctcctgcagctgcacaaccgtgccaagggccaccacgacggggccgcggcgcctggggcgggaggcggcgggggcagctgcagtggcagctccggcctcggggaggccggtgaggacttgagctacggggacgtgcccccaggacccgccttcaaggaggtctggcaggtgatcctgaaacccaagggcctgggtcagacaaagaacctgattggcatctaccgcctctgcctgaccagcaagaccatcagcttcgtgaagctgaactcggaggctgcggccgtggtgctgcagctgatgaacatcaggcgctgcggccactcagagaacttcttcttcatcgaagtgggccgttccgcagtgacgggccccggggagttctggatgcaggtggacgactccgtggtggcccagaacatgcacgagacaatcctggaggccatgcgggccatgagcgatgagttccgccctagaagcaagagccagtcctcctccaactgctccaaccccatcagtgtgcccctgcggaggcaccacctcaacaaccctccacccagccaggtggggctgacccgccgctcgcgcaccgagagcatcacagccacctccccggccagcttggtgggcgggaagcagggctccttccgcgtgcgtgcctccagtgatggcgaaggcaccatgtctcgccccgcctcagtggacggcagtcctgtgagtcctagcaccaacaggacccacgcccaccgccatcgaggcagctcccggctgcacccgcctctcaaccacagccgctccatccccatgccttcttctcgctgctcgccttccgccaccagccccgtcagtctgtcgtccagcagcacgagtggccatggctccacctcagactgcctcttcccgcggcggtctagtgcttctgtgtctggttcccccagtgatggcggcttcatctcctccgatgagtatggctccagtccctgcgatttccgaagttccttccgcagcgtcaccccagattccctgggccacaccccgcccgcccggggtgaggaggagctaagcaactacatctgcatgggaggcaagggggcctccaccctcactgcccccaatggtcactacattttgccccggggtggcaatggtcaccgctacgtgccagccgccggcttgggcacgagcccagccctgccaggagaagaagcagccggtgcggcagatctggataatcggttccgaaaacggactcactctgcgggcacttcgcctaccatttcccaccagaaaaccccgtctcagtcctctgtggcttccattgaggaatataccgaaatgatgcccgcttacccaccaggaggtggcagtggaggccgagtacccagctaccggcactccgccttcgtgcccacccactcctacccagaggagggtctggaaatgcaccccttggagcggcgtgggggccaccaccgcccagacacctccagccttcacactgatgatggctacatgcccatgtccccaggggtggccccagtgcccggcagccggaaaggcagtggggactacatgcccatgagccccaagagcgtgtctgccccgcagcagatcatcaaccccatcagacgccatccccagagagtggaccccaacggctacatgatgatgtccccaagcggcagctgctctcctgacattggaggtgggcccagcagcggtggcagcagcagcggtgccgccccttctgggagcagctatggcaagctttggacaaacggggtagggggccaccactctcacgccctgccacaccccaaacttccggtggagagcggtagtggcaaactcttgtcttgtacaggtgactacatgaacatgtcgcccgtcggggactccaacaccagcagcccctccgactgctattatggccccgaggacccccagcacaagcccgtcctctcctactactcattgccaaggtcctttaagcacacccagcgtcctggggagctggaggagccccggcaccaccagcacctccgcctttcctcaagttccggtcgactcctctacactgcggccgcagaagattcctcttcgtccaccagcagcgacagcctgggcgggggatactgtggggctcggccggagcccggcctcccgcatctccatcatcaggtcctgcaggcccatctgcctcgaaaggtggacacagctgcccagaccaacaaccgcctggctcggcccacgaggctgtctctgggggatcccaaggccagcaccttacctcgggcccgagagcagcagccaccgccccccttgctgctccctccggagcccaagagcccaggggagtatgtgaatattgaatttgggagcgatcagccaggctacttatcgggcccggtggcgtcccacagctcgccttccatcaggtgtccgtcccagctccagccagctcccagagaggaggatacgggcgcagaagagtatatgaacatggacctggggccgggccggagggccacctggcagaagagcgtgggggtccagcccggcagggtgggcccggcgccccctggagctgctagcgtgtgcaggccgactagggcagtgcccagcagctgcggcgactacatgaccatgcagatgggtggtccccggcagagctacgtggacacctcacctgtcgcgcccatcagctacgccgacatgcggacgggcgtcgttgtggaggatgccagcttgcccagggccaccgcggccgctccctcctcatcttcgacagcctctgtttcctccactgcgcctcctccgggaacaggggagctggcggcccgctcggccctcctggggggcccgagcgccttcacgcgggtgaacctcagtcccaaccgcaaccagagtgccaaagtgatccgtgccgaccctcaagggtgcaggaggcggcacagctccgagaccttctcctctacgcccagtgccacccgggtgggcaacacgatgcccttcggagctggggctgccgtcgggggcagcggtggcggcagcagcagcagcgccgaggatgtcaaacgccacagctctgcttccttcgagaacgtgtggctgaggcctggggagctcgggggagcccccaaggagctggcccaagtgtgcggggccgctgggggtttggagaatggtcttaactacatagacctggatttggtcaaggacttcaaacagcgccctcaagagtgcccacctcaaccgcagcctcctccactcccggcccctcatcagcctctggccagtagtcagagcggccccaccagccgctccagcgaggatctaagcgcctatgccagcatcactttccagaagcagccagaggacctccagtagctcaactggacatcacagcaggtgcgtttcatggtgacaaagtcagaagacaaaactgcttttaacctggtgctcgaattctgtgccccagggcccttctctctcctccctctgcttctgtagggagtgcactcctgggagggagaggtctgggcacaggaggggacatgtgcctgatggttagataaatctataggagcagccactccagagggcttttcctcttgagtttcccaagtgaagtactttagtatttccaagacatatatcctgttaataccagttctgaggtttgtaaagttcgtttgtaagaaccttgatctccttatggaagttttcttttgactatatact

SEQ ID NO: 196 - protein, 1237 aa, Bos taurus
MASPPETDGFSDVRKVGYLRKPKSMHKRFFVLRAASEAGGPARLEYYENEKKWRHKSSAPKRSIPLESCFNINKRADSKNKHLVALYTRDEHFAIAADSEAEQDSWYQALLQLHNRAKGHHDGAAAPGAGGGGGSCSGSSGLGEAGEDLSYGDVPPGPAFKEVWQVILKPKGLGQTKNLIGIYRLCLTSKTISFVKLNSEAAAVVLQLMNIRRCGHSENFFFIEVGRSAVTGPGEFWMQVDDSVVAQNMHETILEAMRAMSDEFRPRSKSQSSSNCSNPISVPLRRHHLNNPPPSQVGLTRRSRTESITATSPASLVGGKQGSFRVRASSDGEGTMSRPASVDGSPVSPSTNRTHAHRHRGSSRLHPPLNHSRSIPMPSSRCSPSATSPVSLSSSSTSGHGSTSDCLFPRRSSASVSGSPSDGGFISSDEYGSSPCDFRSSFRSVTPDSLGHTPPARGEEELSNYICMGGKGASTLTAPNGHYILPRGGNGHRYVPAAGLGTSPALPGEEAAGAADLDNRFRKRTHSAGTSPTISHQKTPSQSSVASIEEYTEMMPAYPPGGGSGGRVPSYRHSAFVPTHSYPEEGLEMHPLERRGGHHRPDTSSLHTDDGYMPMSPGVAPVPGSRKGSGDYMPMSPKSVSAPQQIINPIRRHPQRVDPNGYMMMSPSGSCSPDIGGGPSSGGSSSGAAPSGSSYGKLWTNGVGGHHSHALPHPKLPVESGSGKLLSCTGDYMNMSPVGDSNTSSPSDCYYGPEDPQHKPVLSYYSLPRSFKHTQRPGELEEPRHHQHLRLSSSSGRLLYTAAAEDSSSSTSSDSLGGGYCGARPEPGLPHLHHQVLQAHLPRKVDTAAQTNNRLARPTRLSLGDPKASTLPRAREQQPPPPLLLPPEPKSPGEYVNIEFGSDQPGYLSGPVASHSSPSIRCPSQLQPAPREEDTGAEEYMNMDLGPGRRATWQKSVGVQPGRVGPAPPGAASVCRPTRAVPSSCGDYMTMQMGGPRQSYVDTSPVAPISYADMRTGVVVEDASLPRATAAAPSSSSTASVSSTAPPPGTGELAARSALLGGPSAFTRVNLSPNRNQSAKVIRADPQGCRRRHSSETFSSTPSATRVGNTMPFGAGAAVGGSGGGSSSSAEDVKRHSSASFENVWLRPGELGGAPKELAQVCGAAGGLENGLNYIDLDLVKDFKQRPQECPPQPQPPPLPAPHQPLASSQSGPTSRSSEDLSAYASITFQKQPEDLQ

SEQ ID NO: 197 - DNA, 4068 bp, Bos taurus; identical to SEQ ID NO: 195

SEQ ID NO: 198 - protein, 1237 aa, Bos taurus; identical to SEQ ID NO: 196

SEQ ID NO: 199 - DNA, 2456 bp, Bos taurus
ggtgtagcgctcggcgctcaaggggccctgttcccggggtgcctccgccgagggggacaagcccgaggcgcggccagcagaaagccagcgcacagcagccggtgcgcggccgcggcgagggcgggggaagaaaaacaccctgttttctctcgggcccccaccgcggatcatgtaccaggattatcccgggaactttgacacctcgtcccggggcagcagcggctctcctgcgcacgccgagtcctactccagcggcggcggcggccagcagaaattccgggtagatatgcctggctcaggcagcgccttcatccctaccatcaacgccatcacgaccagccaggatctgcagtggatggtgcagcccacggtgatcacttccatgtccagcccatacccccgctcgcacccctacagccccctgccaggcctggcctctgtccccgggcacatggccctcccgagacccggtgtgatcaagaccattggcaccacggtgggccgcaggaggagagatgagcagctgtcccctgaagaggaggagaagcgtcgaattcggagggagaggaacaagctggctgcggccaagtgccggaaccgccgccgggagctgacggagaagctgcaggcggagactgaggagctggaggaggagaagtcgggcctgcagaaggagatcgccgaactgcagaaagagaaagagaagctggagttcatgctggtggcccatgggcccgtgtgcaagatcagccccgaggaacgccggtccccgccggcctctgggctgcaggccctgcgcggcggggccagtggaggggtcggtgccgtggtggtgaaacaggagcccctggaagaggacagcccctcgtcctcatcggcggggctggacaaggcccagcgctccgtgatcaagcccatcagcattgctgggggcttctatggcgaggagcccctgcacacccccatcgtggtgacctccactcctgccatcactccgggcacctcgaacctcgtcttcacctaccccagtgtgctggagcaggagtcgccggcatcgccttctgagtcctgctccaaggctcaccgcagaagcagtagcagtggggaccagtcatcagactccttgaactcccctactctgctggctctgtaacccagctcccaggggcaggggtgggggtcctcgtcactgcctcctgcccagggaccagcaccttccagcgctccggggccgtgaggaaaagagggggaccctgccagagagcttcctggctctggggagacccaggtgggatttggtggtgagtcgccggaggacttggatgagctcttggaaggcacaggacctcctcctccctcgtccatctcgcgaagcaaatccgtttcttgaaaaacattggagaacttggtctggtggactcgggcatctccctggcttctgaagagcctgaagctggtttgggccattcttgtccctcagttccgatgtgtctctggagtgatggtgtccttcccgccccaccaagcatgctcaatgcctttttgttttcaccttccctctatttgccccttccttcccccagtgtcaatttcacttcctcttagttttttatcgaatttgccatgacatttcatctgggtggtctgaatagtaaagctcttcatttctgaagagggggcagcagggtgactctttggctggggctgacttgtccagaaggggacagtccatgtgcaatacagaaccttccctcctctgacacttctggtccaccaccatctccggaaccgccagcagggctccttgaactctccaggagaggccaccatcgccaggaggtttggaggacccttcctacccatcctcggagacggcttttggaggagcagcttggccagaagacagggtgtgagtgagacagcgggggcacggattgggtttgccaaatgcctaattaccaggccaggaatggccaggaatagtgccagcgggccacacgggtgtcccagccagcctctcttcaccccgtgtcttgaataggacgtctcttgtaattaccgcctcgtcgttcagccctggacccttctctccttccttcctcggagccacacgtcactccgagtccctgcccgctccaccctcccccaccctgcctctcagggtgacgccgcccgtggaggtttaatgagcgtgggcctggcccctccccaagcctcaaaatcgcctctgctgtggatggaaaggaagggggaggaaggagggaggcagtcagagtggggtttgcctcgcagcagccccagcgcctgcttctcacctctcaccaaggtgctgggccatgctaccctctgtggtcatctgctacctgatggatctcgcgcttgttctcttacactcccctgccccctcaccccagtgtgcttcccaggtccaccagccagctgtgaacagctggccc

SEQ ID NO: 200 - protein, 327 aa, Bos taurus
MYQDYPGNFDTSSRGSSGSPAHAESYSSGGGGQQKFRVDMPGSGSAFIPTINAITTSQDLQWMVQPTVITSMSSPYPRSHPYSPLPGLASVPGHMALPRPGVIKTIGTTVGRRRRDEQLSPEEEEKRRIRRERNKLAAAKCRNRRRELTEKLQAETEELEEEKSGLQKEIAELQKEKEKLEFMLVAHGPVCKISPEERRSPPASGLQALRGGASGGVGAVVVKQEPLEEDSPSSSSAGLDKAQRSVIKPISIAGGFYGEEPLHTPIVVTSTPAITPGTSNLVFTYPSVLEQESPASPSESCSKAHRRSSSSGDQSSDSLNSPTLLAL

SEQ ID NO: 201 - DNA, 2456 bp, Bos taurus; identical to SEQ ID NO: 199

SEQ ID NO: 202 - protein, 327 aa, Bos taurus; identical to SEQ ID NO: 200

SEQ ID NO: 203 - DNA, 801 bp, Bos taurus
atgacggagtataagctcgtggtggtgggcgccggtggcgtggggaagagcgccctgactatccagctcattcagaatcacttcgtggacgagtacgaccccaccatcgaggactcctaccggaagcaagtggtcatcgatggggagacgtgcctgctggacatcctggacacagcgggccaggaggaatacagcgccatgcgagaccagtacatgcgcaccggggagggctttctctgcgtgtttgctatcaaccacgtcaagtccttcgaggacatccaccagtaccgggagcagatcaagcgggtgaaggactcggatgacgtgcccatggtgttggttgggaacaagtgcgacctggccgcgcgcaccgtggagtctcggcaggcccaggacctcgcccgcagctacggcatcccgtacatcgagacctccgccaagacccgccagggcgtggaggatgctttctacaccctggtgcgcgagatccggcagcacaaggtgcgcaagctgagcccgccggacgagggcggccccggctgcctgagctgcaggtgcctgctctcctgacggcagcgtgggcgcggagcgctgggtgccatgcaggaggcggcgcagcaggggtggagggaggtgccgccagagcccagccccccaggccagtgggcagtgcccgcgggcctcccgggacgcttcgcacagactctggtgaactgatgctgctggcccccagcctcgctctcctccagccctgtcctggcccagcgggcgcaggccgagtcgcagtaaattatttcatgg

SEQ ID NO: 204 - protein, 129 aa, Bos taurus
QEEYSAMRDQYMRTGEGFLCVFAINHVKSFEDIHQYREQIKRVKDSDDVPMVLVGNKCDLAARTVESRQAQDLARSYGIPYIETSAKTRQGVEDAFYTLVREIRQHKVRKLSPPDEGGPGCLSCRCLLS

SEQ ID NO: 205 - DNA, 883 bp, Bos taurus
atgacggagtataagctcgtggtggtgggcgccggtggcgtggggaagagcgccctgactatccagctcattcagaatcacttcgtggacgagtacgaccccaccatcgaggactcctaccggaagcaagtggtcatcgatggggagacgtgcctgctggacatcctggacacagcgggccaggaggaatacagcgccatgcgagaccagtacatgcgcaccggggagggctttctctgcgtgtttgctatcaaccacgtcaagtccttcgaggacatccaccagtaccgggagcagatcaagcgggtgaaggactcggatgacgtgcccatggtgttggttgggaacaagtgcgacctggccgcgcgcaccgtggagtctcggcaggcccaggacctcgcccgcagctacggcatcccgtacatcgagacctccgccaagacccgccagggcagccgctctggctctggctccagctccgggaccctctgggaccctccgggacccccgtgacccagccgcccctctcgctggcgtggaggatgctttctacaccctggtgcgcgagatccggcagcacaaggtgcgcaagctgagcccgccggacgagggcggccccggctgcctgagctgcaggtgcctgctctcctgacggcagcgtgggcgcggagcgctgggtgccatgcaggaggcggcgcagcaggggtggagggaggtgccgccagagcccagccccccaggccagtgggcagtgcccgcgggcctcccgggacgcttcgcacagactctggtgaactgatgctgctggcccccagcctcgctctcctccagccctgtcctggcccagcgggcgcaggccgagtcgcagtaaattatttcatgg

SEQ ID NO: 206 - protein, 170 aa, Bos taurus
MTEYKLVVVGAGGVGKSALTIQLIQNHFVDEYDPTIEDSYRKQVVIDGETCLLDILDTAGQEEYSAMRDQYMRTGEGFLCVFAINHVKSFEDIHQYREQIKRVKDSDDVPMVLVGNKCDLAARTVESRQAQDLARSYGIPYIETSAKTRQGSRSGSGSSSGTLWDPPGPP

SEQ ID NO: 207 - DNA, 747 bp, Bos taurus
atgacggagtataagctcgtggtggtgggcgccggtggcgtggggaagagcgccctgactatccagctcattcagaatcacttcgtggacgagtacgaccccaccatcgaggactcctaccggaagcaagtggtcatcgatggggagacgtgcctgctggacatcctggacacagcgggccaggaggaatacagcgccatgcgagaccagtacatgcgcaccggggagggctttctctgcgtgtttgctatcaaccacgactcggatgacgtgcccatggtgttggttgggaacaagtgcgacctggccgcgcgcaccgtggagtctcggcaggcccaggacctcgcccgcagctacggcatcccgtacatcgagacctccgccaagacccgccagggcgtggaggatgctttctacaccctggtgcgcgagatccggcagcacaaggtgcgcaagctgagcccgccggacgagggcggccccggctgcctgagctgcaggtgcctgctctcctgacggcagcgtgggcgcggagcgctgggtgccatgcaggaggcggcgcagcaggggtggagggaggtgccgccagagcccagccccccaggccagtgggcagtgcccgcgggcctcccgggacgcttcgcacagactctggtgaactgatgctgctggcccccagcctcgctctcctccagccctgtcctggcccagcgggcgcaggccgagtcgcagtaaattatttcatgg

SEQ ID NO: 208 - protein, 171 aa, Bos taurus
MTEYKLVVVGAGGVGKSALTIQLIQNHFVDEYDPTIEDSYRKQVVIDGETCLLDILDTAGQEEYSAMRDQYMRTGEGFLCVFAINHDSDDVPMVLVGNKCDLAARTVESRQAQDLARSYGIPYIETSAKTRQGVEDAFYTLVREIRQHKVRKLSPPDEGGPGCLSCRCLLS

SEQ ID NO: 209 - DNA, 1647 bp, Bos taurus
gccaggaggagcgcgcgggcagcggtgaccgaggcgtgctgggattccagaagtggagaaggaggcaagatgaagactctactgctgttgatggggctgctgctcagctgggagagtggctgggcaatctcggacaaagagctccaggaaatgtccaccgaggggagtaagtacgtgaataaagaaattaaaaatgccctcaaggaggtgaaacagataaagacccaaatagaacaaaccaatgaagagcgcaaattactgctcagctccctagaggaagccaagaagaagaaagaggacgccctgaatgacaccagggattctgaaaacaagctgaaggcgtcccagggggtgtgcaatgagaccatgacagccctttgggaggaatgtaagccctgcctcaagcagacctgcatgaagttctacgcgcgggtgtgcagaagcggatcgggactggttggccaccagcttgaggagttcctaaaccagagctcccccttctacttctggatcaacggtgaccgcatcgattccctgatggagaatgaccgggagcagagccacgtgatggacgtcatggaggacagcttcacccgggcgtccagcatcatggacgagctcttccaggaccggttcttcctccggaggccccaggacactcagtactactcccccttcagctcgttcccgagggggtcactcttcttcaatcccaagtcccgctttgcccggaacgtgatgcctttccccttgttggaacccttcaacttccacgatgtgtttcagcccttctacgacatgatccaccaggcccagcaggccatggacgcccacctgcagaggactccctaccacttccccacgatggaattcacagaaaacaacgaccgtactgtgtgtaaggagatccgccacaactccacgggatgcctgcggatgaaggaccagtgcgagaagtgccaggagatcctggaagtggactgttcggccagcaacccgactcagacgctgctgcgccagcagctgaacgcatccctgcagctggcggagaagttcagcaggctgtacgaccagctgctccagtcctaccagcagaagatgctcaacacgtcggccctgctcaagcagctgaacgagcagttcacctgggtgtcccagctggccaacctcacgcagagcgacgaccagcactacctgcaggtcttcacggtgaattcccacaactccgaccccagcatcccgtctggcctcaccaaggtgattgtgaaactcttcaactccttccccatcacagtgacggtcccgcaggaagtctccagtcctaacttcatggagaatgtggcagagaaagcactgcagcaataccgccggaagagccaggaggagtgaggcgtgaaagttgcttttgcaagtatcgggcgtctgcacccacttgcccctgagatgagcttcaggcccctttagagagctctgcacgtcgccagatgaccaggccctgacctcgaggtcctcctgacccctccagcctctccttcctctgaactcctctgaaacgcactaatgcctgcgtttgctgatcacgggaagaacttgctcgcatgccactaactcaataaaccaccttgtaatctgaaaaaaaaaaaaaaa

SEQ ID NO: 210 - protein, 439 aa, Bos taurus
MKTLLLLMGLLLSWESGWAISDKELQEMSTEGSKYVNKEIKNALKEVKQIKTQIEQTNEERKLLLSSLEEAKKKKEDALNDTRDSENKLKASQGVCNETMTALWEECKPCLKQTCMKFYARVCRSGSGLVGHQLEEFLNQSSPFYFWINGDRIDSLMENDREQSHVMDVMEDSFTRASSIMDELFQDRFFLRRPQDTQYYSPFSSFPRGSLFFNPKSRFARNVMPFPLLEPFNFHDVFQPFYDMIHQAQQAMDAHLQRTPYHFPTMEFTENNDRTVCKEIRHNSTGCLRMKDQCEKCQEILEVDCSASNPTQTLLRQQLNASLQLAEKFSRLYDQLLQSYQQKMLNTSALLKQLNEQFTWVSQLANLTQSDDQHYLQVFTVNSHNSDPSIPSGLTKVIVKLFNSFPITVTVPQEVSSPNFMENVAEKALQQYRRKSQEE

SEQ ID NO: 211 - DNA, 1551 bp, Bos taurus
gacacaagagacatgggttggatccctgggtcaagaagatcccctggagtaggaaatgcaacccactcctggagaattccatggacagaggagcctggctagctacagtccacggggtggcaaagagtcagacaccacccagcaactgaacacacatatacacacctgacctttgaaccaagaatacccttccaaaacactttcacaccctcagccgctaactttggcaaaaaattgtccctgtgatacagaggcttgctgggacagaggcttgccaaggcaagatctgcccagggcactcagcgcccacatgggagcttcatacctcctgtgtgcaaaacttcaccctccctctgactaacaacttaaagaaggggctttctaagccaggggccctcttctctgccttgacctggagagcaggccagggacccacaggagggctcagccttgagattgtgctgcagacataataaaggggtggggaccctggtgggcaggggcggagcgaagcaggtgatatccatccccggagaccagagcccagcatatccgggatctctccctgcgcacatcccaatggaccgcactgtggtactcattaccggctgttcctccggcattggcctacacctggccctgcgactggcgtccgacccgtcccagagcttcaaagtgtatgccacgctgagggacctggcgtcacaaggcccactgttggaggccgcccagtcccgagggtgccttcccggctccctggagacgttgcagctggacgtgagggatgcagattccatagccgctgcccaggcacgcgtgaccgagggccgcgtggacgtgctggtgtgtaacgcaggccggggcctggtggggccgctggaggcacacaaggagggcagcgtggacgccgtgctggacgtgaacctaacggggaccgtgcggatgctgcaggccttcctgccggacatgaagcgccgccgctcgggacgcatattggtgaccgggagcataggcggcttgatggcgcttcccttcaacgccgtttactgcgccagcaagttcgcgctcgagggtttgtgcgagagtctggcgattctgctgcagcccttcggggtccacgtgagcctcatcgagtgcggcccggtgcacacccccttccccgagaaggtggagggcggcctgggcgggatgctggaccgcgcggacgtcgagactcgcgacctcttcaaccgctaccgtcgccactgcgagagggtcatacgtgaggcgggtcaggacccggaggaggtggtcgaggtcttcctccaggcgctacgcgccccgcgcccggccctgcgctacttcaccaccgagcgattcctgccactggtgcagctgcgcttctctgaccccagcggctccagctacgtcgccgctgcgcacaagtcagcgttccacgacaaggccgccgagggctccgacggcgccggggcggagacagaagccggtaaactggaggcatctgagctccgcgctcctctcgccccgcaataaaggcctaatccgctgctg

SEQ ID NO: 212 - protein, 317 aa, Bos taurus
MDRTVVLITGCSSGIGLHLALRLASDPSQSFKVYATLRDLASQGPLLEAAQSRGCLPGSLETLQLDVRDADSIAAAQARVTEGRVDVLVCNAGRGLVGPLEAHKEGSVDAVLDVNLTGTVRMLQAFLPDMKRRRSGRILVTGSIGGLMALPFNAVYCASKFALEGLCESLAILLQPFGVHVSLIECGPVHTPFPEKVEGGLGGMLDRADVETRDLFNRYRRHCERVIREAGQDPEEVVEVFLQALRAPRPALRYFTTERFLPLVQLRFSDPSGSSYVAAAHKSAFHDKAAEGSDGAGAETEAGKLEASELRAPLAPQ

SEQ ID NO: 213 - DNA, 1575 bp, Bos taurus
gacgcaagagacatgggttggatccctgggtcgggaagatcccctggagtaggaaatgcaacccactcctggagaattccatggacagaggagcctggctagctacggtccacggggtggcaaagagtcagacaccacccagcaactgaacacacatatacacacctgacctttgaaccaagaatacccttccaaaacactttcacaccctcagccgctaactttggcaaaaaattgtccctgtgatacagaggcttgctgggacagaggcttgccaaggcaagatctgcccagggcactcagcgcccacatgggagcttcatacctcctgtgtgcaaaacttcaccctccctctgactaacaacttaaagaaggggctttctaagccaggggccctcttctctgccttgacctggagagcaggccagggacccacaggagggctcagccttgagattgtgctgcagacataataaaggggtggggaccctggtgggcaggggcggagcgaagcaggtgatatccatccccggagaccagagcccagcatatccgggatctctccctgcgcacatcccaatggaccgcactgtggtactcattaccggctgttcctccggcattggcctacacctggccctgcgactggcgtccgacccgtcccagagcttcaaagtgtatgccacgctgagggacctggcgtcacaaggcccactgttggaggccgcccagtcccgagggtgccttcccggctccctggagacgttgcagctggacgtgagggatgcagattccatagccgctgcccaggcacgcgtgaccgagggccgcgtggacgtgctggtgtgtaacgcaggccggggcctggtggggccgctggaggcacacaaggagggcagcgtggacgccgtgctggacgtgaacctaacggggaccgtgcggatgctgcaggccttcctgccggacatgaagcgccgccgctcgggacgcatattggtgaccgggagcataggcggcttgatggcgcttcccttcaacgccgtttactgcgccagcaagttcgcgctcgagggtttgtgcgagagtctggcgattctgctgcagcccttcggggtccacgtgagcctcatcgagtgcggcccggtgcacacccccttccccgagaaggtggagggcggcctgggcgggatgctggaccgcgcggacgtcgagactcgcgacctcttcaaccgctaccgtcgccactgcgagagggtcatacgtgaggcgggtcaggacccggaggaggtggtcgaggtcttcctccaggcgctacgcgccccgcgcccggccctgcgctacttcaccaccgagcgattcctgccactggtgcagctgcgcttctctgaccccagcggctccagctacgtcgccgctgcgcacaagtcagcgttccacgacaaggccgccgagggctccgacggcgccggggcggagacagaagccggtaaactggaggcatctgagctccgcgctcctctcgccccgcaataaaggcctaatccgctaaaaaaaaaaaaaaaaaaaaaaaaaaaa

SEQ ID NO: 214 - protein, 317 aa, Bos taurus; identical to SEQ ID NO: 212

SEQ ID NO: 215 - DNA, 3241 bp, Bos taurus
ggagctgctgcggcggcggtgacgggggcggcggccgcgcgtctttggcgggaccagcttcgaggccgcgccgtctctgcagcttgttctgaagagaaggcagagcagctcctggaggcccagagctggcagaggaggctgccatggctgccgtcgacagcttctacctcttgtaccgggaaatcgccaggtcctgcaactgctacattgaagccctcgccttggttggagcctggtacacggccagaaaaagcatcaccgtcgtctgtgacttctacagcctcatcaggctgcatttcatcccgcgcctggtgagcagagcggacctgatcaagcagtatggaagatgggcggtcgtgagtggtgccacggacgggattggaagggcctatgcagaggagctggccagccgtgggctcaacattgtcctgatcagccggagccaagagaagctgcagatggtcgctaaagacatagctgacacctacaaagtggagactgacatcatagtcgcggacttcagcagcggccgcgagatttatgacatgatccgggaagccttgcaggacagagacattggcatcctggtgaataacgtgggtgtgttctacccctatccgcagtacttcacgcaggtctctgaggacacgctctgggacatcgtcaacgtgaacatcgcggcggccagcctcatggtccacatcgtgttgccagggatggtggagaggaagaagggcgccatcgtcaccatctcctctggctcctgctgcaaacccaccccccagctggcagcgttctcagcatctaaggcttatttagaccacttcagcagagcattgcagtatgaatatgcttccaaaggaatctttgtacagagtttaatcccattctacgtggctaccaacgtggccacccctggcagctttctgcacaagtgcccatggttggtgccttccccaaaagtgtatgcacatcatgctgtttctaccctcggcatttcaaaaaggaccacaggatactggtcccattccatccagtttcttttcgcacagtatatgcctgaatggctctgggtgtggggagcaaatattctcaaccgttctttgcgtaaggaggccttatcctgcaaagcttgaagccagatgatggttgggaagtttgaccaattcgtgggagcctgcagtattctacatttggaggaacacatggaatttatcttctgcattttttttttcacgactgattatttagcatactcttgactcatcctttgcaaaacaaacataagccttttaagagtgctgtgggaaagccttcagggccgcacggagggcacagggtgaataccgactgtggctcgagaaccgatggaggacacctagaatgtgatgtgtgcttttgttttttaaacttttcagaagttgtgtgatatatgttgttctaggagctccagtaatatgatactgaaatatgatataacttggtagctcttacagtctcacatgtttcttaagggaaattatctatgtcagtagatgaattacagcattggttttcaaatgtccatcaggaaagactattgaaaagcgttattttctaggtaaggttgctggtgtgattagtggaaacctgtattgcattgtgtagctttagtcgtttggctctctgtgtatgaaatgctgctcctcaactgatacttggagacccacgtgtgtacacatgttgtgtacatccgggcaactgtatttattggtagtttactttaaaaagtatttcttgtcaacatgtcttaatgtggcacccaaaggggtattaaaattctgcattattatttttcaccctaaacgaggccacctaattttgtgctataggtttgccatatataatatcacctaacagtgttctggtttttttttttaatctactaaggaattaattcattcatagatttggacatgtgatgactgaccctcagtcatctcttgatttatagttactgtggataagtagtgacttctcagcctatgacccattttataactgaagtttagccctctagaacttctcatacctggttgtgaaacacttttctgtgtaatattattccatcccagtagcattaatgatataaatatcaagtatttatagaataatagttaaaatatggacaaattacgtgtgtgaaaagacatactgtatctgttgaaatcagtcagaagctcgttcttgattcatgtaacaaatttgtatgttatagtgaacacttccattgatgtgaagataattaatgcccgataaccaccactctatgggtttgcactgaaacctgctgtgtagtctttttggctcaggtctcctgaagccaaacatttttgagaaccacatacctagtgctttgacagttgtaaatcacgagacgaaatgacagtatgtgcacatttgagatccagagtttaatgttgcagcgctgatgcagaaaccagttaattgaaatcaggacttttatggaatcactgactcctgagctgatacccattacaagggggcctgagcatgcttttattttatgcccacggttttgccagtgacattgccttagtatttccagacctgacttggactcaggatcagaggttaaattcagaagctcttccatcgacagatcaggccttcatcacacaagaggaagaagtgcagtgtggaaagtcacattccagtgattcgacacagaagtgccgactttgatggcattagctggaagcctttgtcatatttggcgtttccccacctgacagttaattgatggtcattaagactagagaaaacttgacttcatgccatattgacttgaactttgacatataataagcagcgatgtgatgtaaaaataccatatttatatttaaggtgatgtgtggtacagcagtgtcttatagattagatgttggatcattgttacatgatgagactaagtaaaccatgtcagtgatgttttaaaattctcttcttggcaggatgtatgtaaatatactgattggtgcaaagttcacgaaagatgaaaaccaagaatcttccttaggtttcatctttcccagcgctcatttgagagttataattggaccactgtagctggggtttcttattaaggatgtgggaaataaacctttgaaacaacttgtgacctgaaaatttaacaataaaagcagttgcttctgcttcctttagaaaaaaaaaaaaaaaa

SEQ ID NO: 216 - protein, 330 aa, Bos taurus
MAAVDSFYLLYREIARSCNCYIEALALVGAWYTARKSITVVCDFYSLIRLHFIPRLVSRADLIKQYGRWAVVSGATDGIGRAYAEELASRGLNIVLISRSQEKLQMVAKDIADTYKVETDIIVADFSSGREIYDMIREALQDRDIGILVNNVGVFYPYPQYFTQVSEDTLWDIVNVNIAAASLMVHIVLPGMVERKKGAIVTISSGSCCKPTPQLAAFSASKAYLDHFSRALQYEYASKGIFVQSLIPFYVATNVATPGSFLHKCPWLVPSPKVYAHHAVSTLGISKRTTGYWSHSIQFLFAQYMPEWLWVWGANILNRSLRKEALSCKA

SEQ ID NO: 217 - DNA, 1842 bp, Bos taurus
ctcccctggctggtgtcctgctgcaccccgcgtcccagccccgagtcccagtccctgctcttcagcccagtccctgccccgccccggcccggccgccatggaaagctggccctggccgtcgggcggcgcctggctgctcgtgccggcccgtgcgctactgcagttgctgcgcgcagacctgcgtctgggccgcccgctgttggcggcgctggcgctgctggccgcgctcgactggctgtgccagcgcctgctacccccgctggccgcacttgccgtgttggccgccaccggctggatcgtgttgtcccgcctggcgcgcccgcagcgcctgcccgtggcgactcgcgcggtgctcatcaccggctgtgactctggttttggcaacgcgacggccaagaagcttgacaccatgggcttcacagtgttggcgaccgtgttggatctgaatagccctggggccctagagctgcgtgcctgctgttcttctcgtctgaagctgctacagatggacctgaccaagccaggagacattagccgtgtgttggagttcaccaaggtccacacgccaagcacaggtctgtggggcctggtcaacaacgcgggccagaacatctttgtggcggatgcagagctgtgtccagtggccactttccgcacctgcatggaggtgaacttctttggtgcactagagatgaccaaaggcctcttgccactgctgcgtcgttcaagtggtcgaattgtgaccgtgagcagcccagcaggagacatgccatttccatgcttagctgcctatgggacctccaaagcagccttggcgttgctcatgggcaattttagctgtgaacttctgccctggggtgtcaaggtcagcatcatccagcctgcctgcttcaagacagagtcagtgaaggacgtgcaccaatgggaagagcgcaagcagcagctgctggccaccctgcctcaagagctgctgcaggcctatggtgaggactacatcgagcacttgaatgggcagttcctgcactctctgagccaggccctgccagacctcagccctgtggtagatgccatcaccgatgcgctgctggcggcccagccactccgccgctattacccaggtcatggcctggggctcatatacttcatccactactacctgcccgagggtctgcggcagcgtttcctgcagtccttcttcatcagtccctatgtgccgagagcactacaggctggccagcctggccttacctctgcccgggacatagcccaggaccaaggccctagaccggatccttctcccactgcccagtgagcaggtcacacgtagagcagctccagcagaggaggttccttgtgcccttgctcctcctccaggtattctgacccccaaggtctgccctagagcctggcccaaaggaccccaccccatgcactgccgatgccacaggccaggcctggtgaggtgaaggctttccagtgaacctctgggcctctcctgcttcatgagcccaaacagaccctcctgggcacaaggctccaccatgcagcttgcagaacccagctggatggggagtttagttcaaggcttaactagagccttagccaggatcctacagacagtgcctctgcaaactaaggcgagattaggtaggttggggaccccctcaggattatttcttggcaccagtgcctcagtgctgtgatttgaagggtgaaccctgtttcttgactggctcaaggattagggccctgaccacccaccccaagccccccaaggcacagggaggctacatactcaccttattgccacttttttaataaagacaaatttttatttctcct

SEQ ID NO: 218 - protein, 404 aa, Bos taurus
MESWPWPSGGAWLLVPARALLQLLRADLRLGRPLLAALALLAALDWLCQRLLPPLAALAVLAATGWIVLSRLARPQRLPVATRAVLITGCDSGFGNATAKKLDTMGFTVLATVLDLNSPGALELRACCSSRLKLLQMDLTKPGDISRVLEFTKVHTPSTGLWGLVNNAGQNIFVADAELCPVATFRTCMEVNFFGALEMTKGLLPLLRRSSGRIVTVSSPAGDMPFPCLAAYGTSKAALALLMGNFSCELLPWGVKVSIIQPACFKTESVKDVHQWEERKQQLLATLPQELLQAYGEDYIEHLNGQFLHSLSQALPDLSPVVDAITDALLAAQPLRRYYPGHGLGLIYFIHYYLPEGLRQRFLQSFFISPYVPRALQAGQPGLTSARDIAQDQGPRPDPSPTAQ

SEQ ID NO: 219 - DNA, 2487 bp, Bos taurus
gagtttgcaaaagccagaggtgcaaggagcagcgactgcagcagcaacaacagcagcagcaaaaagcgccagcggaagcaacatcagcagcagcaacaacagaaaaatcctcatcaaatcctcacctaggttctcagtgtatccagatccacatcttcactcaagccgggagagggaaagaggaaagggggggaggaaaaaaaaaaaacccagcaacttagcggaaacttctcagagaatgctccaaaactcagcagtgcttctggtgctggtgatcagtgcttctgcaacccatgaggcggagcagaatgattctgtgagcctcaggaaatcccgggtggcagctcagaactcagctgaagtgattcgctgcctcaacagcgcgctgcaggttggctgtggagcttttgcatgcctggagaactccacctgtgacacagatgggatgtacgacatctgtaaatccttcttgtacagcgctgctaaatttgacactcagggaaaagcatttgtcaaagagagcttaaagtgcatcgccaacggggtcacctccaaggtcttcctggccattcggaggtgctctactttccagaggatgattgccgaagtccaggaggagtgctacaccaagctgaacgtgtgcagtgtcgccaagcggaacccggaagccatcacggaagtcgtccagctccctaatcatttctccaacagatactataacagacttgtccgaagcctactggactgtgacgaagacacagtgagcaccattagagacagcctgatggagaaaatcggccccaacatggccagcctctttcacatcctgcagacggatcactgtgcccatacacagcagcgagctgacttcaacaggaggcgtgccaatgagccacagaagctgaaagtcctcctcaggaacctccgaggtgaggtggcctctccctcccacatcaaacgcacctcccaggagagtgcctagctggggagaggcaatcacagcctcagcaaactacgatcgttttaagggtgtttacgcaccaactttgagtgtactgtgcctggtttgattttttttttttttaagtagttcctattttctatccctcttcccttaaagaaaaattgcatgaaactaggcttctgtaatcaatttctcaacattttgcaatggcggcattcccaccaatagaacatatgtgatctctatgcctctcctcgggagaaagtggcctcttttatcacttccctccactcggtcttttcccagctcccctccaacaactctcaaacacaaaacattcacataactccccagacattgtcatttgaagatgcggagccctttagaatggttgccccagtagagttagctgataagaagcaacttaatttaaatgcatgtcttaaaccaatgctcataaagatgctcagtggaattcgtgttatgaatctgtgctggccatggacgaatatgaatgtcatatttgagttcttgatctctcatgagctagtgtcttatggtcttgatcctcaatgtctaatttccttcccaacacatttaccaaattgctcgagcctggctctccaaccagacttggagcctgcatcttcttgcatcgaatgaaaaacaaaaagctaacatctctaagtactgtaactgctcagagctttaaaagtatctttaacaattgtcttaaaaccagagaatcttaaggtctaactgtggaatataaataggtgaaaactaatgtactgtacataaattccagaggactctgcttaaacaaagcagtatataataactttattgcatatagatttagttttgtaacttagctttatttttcttttcctgggaatggaataactatctcacttccagatatccacataaatgctccttgtggccttttttataactaagggggtagaagtagttttactcaacatcaaaacttaagatgggcctgtatgagatagaaaaaaaaaaaaaaacaacaggtttatctgaaggaccccaggcaagatgttaatctcccagcccacctcaacccagaggctactcttgacttagacctatcctgaaacagctctgtcacatccaactgagaattacaggagccagaaagagcgaccctttgagcttgggccacttaagagtgtgatccggcctgctatgccttgggaagtggcagttcttgacttgtcaccgttcatcagtgcctggttctctggcaacatgatgatggggtaggaggctttccatgaactcaatcaggaatgagtcaatcagcctttgggtctttagttcgggggacttggggctgagggggtataagtaaccctgggttgtccagccttaataaactcctcttattacatttttgtcctgtagcacgctgccttgctgaagtagtcctggcagccgggccatctctgtataggattgcaaaaaaaaagaaaaaaacaaaaaaaaaaaaaaaa

SEQ ID NO: 220 - protein, 247 aa, Bos taurus
MLQNSAVLLVLVISASATHEAEQNDSVSLRKSRVAAQNSAEVIRCLNSALQVGCGAFACLENSTCDTDGMYDICKSFLYSAAKFDTQGKAFVKESLKCIANGVTSKVFLAIRRCSTFQRMIAEVQEECYTKLNVCSVAKRNPEAITEVVQLPNHFSNRYYNRLVRSLLDCDEDTVSTIRDSLMEKIGPNMASLFHILQTDHCAHTQQRADFNRRRANEPQKLKVLLRNLRGEVASPSHIKRTSQESA

SEQ ID NO: 221 - DNA, 1854 bp, Bos taurus
agcagcagctgtgggggcagcatgctagcaagggggcttcccctccgctcagccctggtcaaagcctgcccacccatcctgagcacagtgggggagggctggggccaccacagggtgggcactggagagggagctggcatctccacaaagacccctcgcccctacagtgagatcccctcccctggtgacaatggctggcttaacctctaccatttctggagggagaagggctcacagagaatccactttcgccacatcgagaacttccagaagtatggccccatttacagggagaagcttggcaatttggagtcagtttatatcattcaccctgaagacgtggcccatctcttcaagttcgagggatcctacccagagagatatgacatcccgccctggctggcctatcaccgatattatcagaaacccattggagtcctgtttaagaagtcaggaacctggaagaaagaccgggtggtcctgaacacggaggtgatggctccagaggcaataaagaacttcatcccactgctgaatccagtgtctcaggacttcgtcagcctcctgcacaagcgcatcaagcagcagggctccggaaagtttgtaggggacatcaaggaagacctgtttcactttgcctttgagtccatcaccaatgtcatgtttggggagcgcctggggatgctggaggagacagtgaaccccgaggcccagaagttcattgatgccgtctacaagatgttccacaccagtgtccctctgctcaacgtccctccagaactgtaccgtctattcagaaccaagacttggagggaccatgtagccgcatgggacacaattttcaataaagctgaaaaatacactgagatcttctaccaggacctgagacggaaaacagaatttaggaattacccaggcatcctctactgcctcctgaaaagtgagaagatgctcttggaggatgtcaaggccaatattacggagatgctggcagggggtgtgaacacgacatccatgacattgcaatggcacttgtacgagatggcacgcagcctgaatgtgcaggagatgctgcgggaggaggttctgaatgcccgacgccaggcagagggagacataagcaagatgctgcaaatggtcccacttctcaaagctagcatcaaggagacgctgagactccaccccatctccgtgaccctgcagagataccctgaaagtgacttggttcttcaagattacctgattcctgccaagacactggtgcaagtggccatctatgccatgggccgagaccctgccttcttctccagtccggacaagtttgacccaaccaggtggctgagtaaagacaaagacctcatccacttccggaacctgggctttggctggggagtgcggcagtgcgtgggccggcggatcgccgagctggagatgaccctcttcctcatccacattctggagaacttcaaggttgaaatgcagcatatcggtgacgtggacaccatattcaacctcatcctgacgccggacaagcccatcttccttgtcttccgccccttcaaccaggacccgccccaggcgtgaccggagagggcgggcactgccctttccaccaatccagctagctggggtgtgggaagacggcccgagggggtggggccatggaggtacccgcacctccattgctcgctcagtccacacctcttgcacctttctggctaggtctgaccagatgaagctggcactcaggggtcagctgcttccgctcagctgaggcacccctgtctcaccctacctcttcccttcttcgcccatcccatgaaggcaataaacgagtgaacgctgaaaaaaaaa

SEQ ID NO: 222 - protein, 520 aa, Bos taurus
MLARGLPLRSALVKACPPILSTVGEGWGHHRVGTGEGAGISTKTPRPYSEIPSPGDNGWLNLYHFWREKGSQRIHFRHIENFQKYGPIYREKLGNLESVYIIHPEDVAHLFKFEGSYPERYDIPPWLAYHRYYQKPIGVLFKKSGTWKKDRVVLNTEVMAPEAIKNFIPLLNPVSQDFVSLLHKRIKQQGSGKFVGDIKEDLFHFAFESITNVMFGERLGMLEETVNPEAQKFIDAVYKMFHTSVPLLNVPPELYRLFRTKTWRDHVAAWDTIFNKAEKYTEIFYQDLRRKTEFRNYPGILYCLLKSEKMLLEDVKANITEMLAGGVNTTSMTLQWHLYEMARSLNVQEMLREEVLNARRQAEGDISKMLQMVPLLKASIKETLRLHPISVTLQRYPESDLVLQDYLIPAKTLVQVAIYAMGRDPAFFSSPDKFDPTRWLSKDKDLIHFRNLGFGWGVRQCVGRRIAELEMTLFLIHILENFKVEMQHIGDVDTIFNLILTPDKPIFLVFRPFNQDPPQA

SEQ ID NO: 223 - DNA, 1000 bp, Bos taurus
gacacagcagcgcgcgcccacactctagcagctgctggcccaaacgtgggttggctgtgaaccccgcgcgaggagcagcggtcacaacttcctgagttcgatacgacgactgcacgcttccatccggtgtgtaatgagtcacagcatgaagcagaaacaagaaggactccaagagaatgtaaagagtagtcctgttccaagaagaactctgaagatgattcagccttctacggctggatctctagttggaagagaaaatgagttggttaaaggcttgtccaaacagaaacattggaatgcccagttaatatctaagacttccagctctggagttgttactgaccaagaatgtagtaaaagtaaaactcttggaggagtcagccaagaagcatttgatcttatgattacagaaaatccatcccctcaatattggaaagaagtggcggaaaaacggaggaaggctctctatgaggcacttaaggaaaatgagaaacttcataaggagattgaacaaaaggacagtgaaattgcccgcctgaaggaggagaataaggaactggcagaagtagcagaacatgttcagtatatggcagagatgatacagaggctgagtcatgaacctctggacaaccttgaatcaccgtatagtcaggaatttgatcctgaacaggcaactgctgaggattctgagtgaagtagaagactcagaaattggtggtacatgtgctgaagaagttgtctcttcctctacagatgtaaaaccgagtatatgaaattcagtaactgccaaagtttacctccgctgtagttctttgtagcagaacaaataactttataatgaaaacttgttatcagactttcttgtttgtatcctggaaccctgttattgtattaaaatacaaatactatgtgtttttaatctatggtgttctgtgtaaatagcattttctcagttgtcagacatgacctgtgtatataataaataaacttcatcctgtcg

SEQ ID NO: 224 - protein, 186 aa, Bos taurus
MSHSMKQKQEGLQENVKSSPVPRRTLKMIQPSTAGSLVGRENELVKGLSKQKHWNAQLISKTSSSGVVTDQECSKSKTLGGVSQEAFDLMITENPSPQYWKEVAEKRRKALYEALKENEKLHKEIEQKDSEIARLKEENKELAEVAEHVQYMAEMIQRLSHEPLDNLESPYSQEFDPEQATAEDSE

SEQ ID NO: 225 - DNA, 5180 bp, Bos taurus
cccacggtgtcttcatcagaggctccagagaggagtgaatagtgaggatttgccttggaggaacttgcgctgtggtgatgacgaaggacatcccactgcagaggcagctttgttactgcccttcaaaggacttatcacaaccaggactttaaattacttcccctgagatcaagtaaaacaaaatgcttttggaagtgctgaacccaaggcattacaacgtcaccagcatggtgtccgaagttgtgcctattgccagcattgcaatcctgctgctcactggatttcttctcttggtttggaattatgaggacacatcctcaataccaggtcccagctactttctgggaattgggcccctcatttcccactgcaggttcctctggatggggatcggcagtgcctgcaattactacaacaagatgtatggagaattcatgagagtctgggtatgtggagaggaaacccttattattagcaagtcctcaagtatgttccatgtaatgaagcacagtcactacatatcccgatttggcagtaaacttgggttgcagttcatcggcatgcacgagaaaggcatcatatttaacaataatccagcactctggaaagctgttcgacctttctttacaaaagctttgtccggccctggcctggtgcgcatggtgaccatctgtgctgattccatcaccaagcatctggacaggctggaggaggtctgcaatgacttgggctatgtggacgtgttgaccctcatgcggcgcatcatgctggacacctctaacatgctcttcctggggatccccttggatgaaagtgccatcgtggttaaaatccaggggtattttgatgcatggcaagctctccttctcaaaccagacatcttctttaagatttcttggctgtgcagaaagtatgaaaagtctgtcaaggacttgaaagatgccatggaaattctcatagaagaaaaaagacacaggatttcaacagcagagaagctggaagacagcatagatttcgccactgagttgatttttgctgagaaacgtggtgaacttacaagagagaatgtaaaccagtgcatattggaaatgctgatcgcagcgccagacaccatgtctgtttctgtgttcttcatgctgtttcttattgcaaagcatccccaggttgaagaggcaataataagggaaatccagactgttgttggtgaaagagacataaggattgatgatatgcaaaagctaaaagtggtggaaaactttattaatgagagcatgcggtaccagcccgttgtggacctggtcatgcgcaaagccttagaggatgatgtcatcgatggctacccggtgaaaaaggggactaacattatcctgaatcttggaagaatgcatagactcgagtttttcccaaagcctaatgagtttactcttgaaaactttgccaagaatgttccttacaggtactttcagccatttggctttgggccccgggcctgtgcgggaaagtacatcaccatggtgatgatgaaggtcgtcctggtcacccttctgagacgcttccacgtgcagactttgcaaggtcggtgcgttgagaagatgcagaagaaaaatgacttatccttgcatccagacgagaccagagaccggctagaaatgattttcaccccaagaaattcagacaagtgcctcgagcgctaaagaagtttggtcagtccctgccccagagcactgctcaacagaactccacatgggaaccacccatctttgccaggtagtcctcctcacatgaacaaccatggcctgtgccattttataggcttacctcctgtgggttgtcagctaggcaggagacacggttcatctgaccagatccaaaccagacaccagactgcaagagaaaatagaggccaagagtttgtacaggaaactgcagccctaaagacccaattccacaaaacatgctttgcatgaaagtgaaaagtgaaagtaaagtcgttcagttgtgtccgactcttagcaacctcatggatttgcagcctactaggctcctccgtccatgggattttccaggcaagagtactggagtgggttgccattgccttctcagttggaaaagacaagccaccagcaaaactcaccccagctccttactgtcctacactgaattgggagctttttaacatctggggcagaagcactcaatttgattacaaaggccaggccaacatctgcgtaccttggatcaaacatatctcctactatgaataaaacggttttcatttgctttttggtggggtggggactacaacatccatacccttggagaaatgcttacaaattcagcatttgacttttcctacaaactacattcaagtaactcttgtttatccacatgtgacttgtctgcagaaaaagttaaattgaagactatcctttcccaatttctcaatttattcctctcttacctctgatacaacaggtgtagattcaggtatatgaatacaaagtaacttattaatagcctgaataagatataattactaccattcatctgccatactaaaaaattcacacaatacattttaaattaaataaaattcctcttttcatatctgcatagttggttagctccaggagtgcagtaaccaagagataaatttagataatggcacctattaactcttactgaagcttctgtgattttcagggagggtaagactctgaatgtatatctaaatctacaacccagtgggttcaaactctaaggagtgctccttgtaccattatccttctctctcaccatttcttccctcttctttctttccatgaccctaagccaagagcaacaagcatatcagtagagaacacagccagggtagaacccctacaatcacattttatcctagctccaatttaacagttacctatgagatttaacagttaacctgatttactgaatcaccactctatgtaaccatagaaaaatgcacatcttggaattagcgccaaatcaaacagatgagtgaattttccaagtattaatagtattttccttgtgtattattgatatggccttacaagtgtatctgctgaatgccacataaaaactcaaaaactaaattcatttacaaatatgtaaatgtttgccattgagtcaacctgaatattcttctcatcctgctgtttggcagtagggcaacagctgagtataaaatgagaatgtaagctactgagagtggaagctcttttctttcttttggaatccatgcctgtcccttattctcactccccatatttattttcaagatcaatactgaattgacactctggcccagagatattctaattgacccagaaatcaagtaaaggagaagcaggaatcctaaaaattaaaggatgggcattaataaagcagcaagtatttgaaattgaaattatctagatcatctatatgacataaacatatgcagaaatatatctgtgtatctggatgtatctgtgttgtcaggtctagaaaatgaaagtcactcggtcatgtccaactctttgtgacccatggactatacagtccatggaattcctccagaccagaatactggagtgggtagtcttttccttctccaggggatcttcccagggatcccagggattgaactcaggtctcccacattgcaggctaattctttaccagctgagccacaagggaagcagtcaggtctagatgagtatccaaacacttcaaaagcttgaaagaaaaggattttagactgaacggatcctcattaattcacttggtgattattaatggtttccttgtctggctggagctacatagtagagcaaaacagactttggatccctgtacttcatccatctaattctcctgaacatctactgtatttaatatgcatatatgcagccaaggtcatactctgcctatacaaagtgaaatggaaggtgaatatagttgtatatagataatgcagataccaaaatatgctcggggaaaactggggtggggtggggccaaggagagagggaaaatataggttagcgttgtctaagcaaactctcccagaaacaagttacctgggtaattgttcagcttgtcactcttttcccggtattgacaaacctcataagtatgtacagacttggcttaaggaatatggaatgtcattgactttacattgggttgatgaatgtatatttgaaaatcctgttttcgcatcagaattttgccttattgttaagtacttaattgtgactctgaatgtgctatgtattctgtcttcaccacctctcaaagaactggaatgtataaattattaaggaaatgcatacacatgagggctctatcattttcaacctgtgaggaaaactgtagtctcccatctttggaagttccagacacctgcctctgccttcatcgacctcttactcttccctcccccaaatggaaaatcatctcatttagaaagactccacataatgggaaatgccagttggaagctgtcactttttatttcttaagcagcacccctcaccattcatggtgctaatattccacagaagtgtggggcactggcccactggaaagagtgctagctgggccctcctcaatctcctgtagtagttggtctctggaactgaatttctcatctgtatttgcaaaaaactggctaaactttgtcaaagtatggagttgaatggaatttgtggtactttcagttgaacttagctcaaaaacaaagtcaagcgctaagggcaaagacaaactctccgtggctcaactcaagatgttactcattctcttactgaagtttttagccggttttgacctatgtctagggagtcactgccatgccatttccaccaggtcaacaagacaaaaggaatgcatatagataaggtaatctggtcctcaaacccagcccatcaggcatacatgcctcttttatgttccaccaagaaagcattacaggaaacccaaacaggggctctgtatcaacctagaggggtgggatggggagggaaatgggagggaggttcaaaagggaggggatatatgtatacctatgttgattttgacaatgattcatgttgatgtttgacagaaaacaacaaaattctgtaaagcaattattcttgaataaaaaaataaaaagaaatattaccgactac

SEQ ID NO: 226 - protein, 503 aa, Bos taurus
MLLEVLNPRHYNVTSMVSEVVPIASIAILLLTGFLLLVWNYEDTSSIPGPSYFLGIGPLISHCRFLWMGIGSACNYYNKMYGEFMRVWVCGEETLIISKSSSMFHVMKHSHYISRFGSKLGLQFIGMHEKGIIFNNNPALWKAVRPFFTKALSGPGLVRMVTICADSITKHLDRLEEVCNDLGYVDVLTLMRRIMLDTSNMLFLGIPLDESAIVVKIQGYFDAWQALLLKPDIFFKISWLCRKYEKSVKDLKDAMEILIEEKRHRISTAEKLEDSIDFATELIFAEKRGELTRENVNQCILEMLIAAPDTMSVSVFFMLFLIAKHPQVEEAIIREIQTVVGERDIRIDDMQKLKVVENFINESMRYQPVVDLVMRKALEDDVIDGYPVKKGTNIILNLGRMHRLEFFPKPNEFTLENFAKNVPYRYFQPFGFGPRACAGKYITMVMMKVVLVTLLRRFHVQTLQGRCVEKMQKKNDLSLHPDETRDRLEMIFTPRNSDKCLER

SEQ ID NO: 227 - DNA, 1001 bp, Bos taurus
atgccccaggtaaagggggagactcggagaagatggtgctcaccgcggtcctccttcttctggccgcctgtgcgggatcggcccagggtctgggctccttcgtgcactgcgagccctgcgacgagaaagccctctccatgtgcccccccagccccctgggctgcgagctggtcaaggagccgggctgcggctgctgcatgacctgcgccctggccgaggggcagtcgtgcggcgtctacactgagcgctgcgcccaggggctgcgttgcctcccccggcaggacgaggagaagccgctgcacgccctgctgcacggccgcggggtttgcctgaacgaaaagagctaccgcgagcaagccaagatcgaaagagactcccgtgagcacgaggagcccaccacctccgagatggcagaggagacctactcgcccaagatcttccggcccaagcacacccgcatctccgagctgaaggccgaggctgtgaagaaggaccgcagaaagaagctgacccagtccaagttcgtgggaggagctgagaacactgcccatccccgggtcatctccgcgcctgagatgagacagaaatctgagcaggggccctgccgcaggcacatggaggcgtccctgcaggagctcaaagccagcccgcgcatggtgccccgcgccgtgtacctgcccaactgtgaccgcaaagggttctacaagagaaagcagtgcaaaccttcccgtggccgcaagcgtggcatctgctggtgcgtggacaagtacgggatgaagctgccgggcatggagtacgtggacggggactttcagtgccacaccttcgacagcagcaacgttgagtgacgcgtcccctccccgtctttccctcaccccatcccacccccagccccgactccagccagtgcctccctccaccccaggacgccactcatttcatctcatgtaagggaaaaaaaaaatacatatatctatctatttgaaaaaaaaaaaaaaaaa

SEQ ID NO: 228 - protein, 271 aa, Bos taurus
MVLTAVLLLLAACAGSAQGLGSFVHCEPCDEKALSMCPPSPLGCELVKEPGCGCCMTCALAEGQSCGVYTERCAQGLRCLPRQDEEKPLHALLHGRGVCLNEKSYREQAKIERDSREHEEPTTSEMAEETYSPKIFRPKHTRISELKAEAVKKDRRKKLTQSKFVGGAENTAHPRVISAPEMRQKSEQGPCRRHMEASLQELKASPRMVPRAVYLPNCDRKGFYKRKQCKPSRGRKRGICWCVDKYGMKLPGMEYVDGDFQCHTFDSSNVE

SEQ ID NO: 229 - DNA, 1328 bp, Bos taurus
atggcccggttcacacagctcggctccctcaacctcctaactcctaacattccagcgccagcccctccctcctgccgctcctgggagctcaagccgggcagaaaccagaaccctgttcggagctgctggaatcccacgcctcataaatcaggatgcaccctgagctgtgggaccaaaggagtgctctggaaaacgcgctacaacctcagccagggcggctacgaggagctcgagcgcgtcgtgctgcgcctcaagccgcacaaggccggcgtgcagtggcgcttcgccggctccttctacttcgccatcaccgtcatcaccaccatcggctacggccacgcggcacccagcaccgatggcggcaaggtgttctgcatgttctacgcgctgctgggcatcccgctcacgctggtcatgttccagagcctgggcgagcgcatcaacaccttcgtgaagtacctgctgcaccgagccaagcgggggctgggcatgcggcgcgcagacgtgtccatggccaacatggtgctcatcggcttcttctcgtgcatcagcacgctgtgcatcggcgccgctgccttctcctactacgagcactggaccttcttccaggcctactactactgcttcatcacgctcaccaccattggcttcggcgactacgtggcattgcagaaggaccaggcgctgcagacgcagcctcagtacgtggccttcagcttcgtctacatcctcacgggcctcacggtcatcggcgccttcctcaacctcgtggtgctgcgcttcatgaccatgaacgcggaggacgagaagcgcgacgccgagcaccgcgcgctgctcacgcgcaacgggcaggcgggcggcgggggcagcgcgggcggcgcgggcggcgggggcggcagcgctcacaccaccgacaccgcctcgtccaccgcggcgggcggcggcggcggcggcttccggaatgtctacgccgaagtgctgcacttccagtccatgtgctcgtgcctctggtacaagagccgcgagaagctgcagtactccatccccatgatcatcccgcgggacctctccacgtccgacacgtgcgtcgagcagagccactcatcgccgggagggggcggccgctacagcgacacgccctcgcaccgctgtctctgcagcggggcgcagcgctccgccatcagctccgtgtctaccggcctacacagcctgtccactttccgcagcctcatgaagcgcaggagctccgtgtgaacgcccccctccggggcctggagcacctaggagcacctaggagcacgggcggggtggggcagggtgcgggggaa

SEQ ID NO: 230 - protein, 417 aa, Bos taurus
MARFTQLGSLNLLTPNIPAPAPPSCRSWELKPGRNQNPVRSCWNPTPHKSGCTLSCGTKGVLWKTRYNLSQGGYEELERVVLRLKPHKAGVQWRFAGSFYFAITVITTIGYGHAAPSTDGGKVFCMFYALLGIPLTLVMFQSLGERINTFVKYLLHRAKRGLGMRRADVSMANMVLIGFFSCISTLCIGAAAFSYYEHWTFFQAYYYCFITLTTIGFGDYVALQKDQALQTQPQYVAFSFVYILTGLTVIGAFLNLVVLRFMTMNAEDEKRDAEHRALLTRNGQAGGGGSAGGAGGGGGSAHTTDTASSTAAGGGGGGFRNVYAEVLHFQSMCSCLWYKSREKLQYSIPMIIPRDLSTSDTCVEQSHSSPGGGGRYSDTPSHRCLCSGAQRSAISSVSTGLHSLSTFRSLMKRRSSV

SEQ ID NO: 231 - DNA, 1290 bp, Bos taurus
atgaagcggcagaacgtgcgcacgctggcgctcatcgtgtgcaccttcacctacctgctggtgggcgccgcggtcttcgacgcgctcgagtcggagcctgagatgatcgagcggcagcggctggagctgcggcagcaggagctgcgagcgcgctacaacctcagccagggcggctacgaggagctcgagcgcgtcgtgctgcgcctcaagccgcacaaggccggcgtgcagtggcgcttcgccggctccttctacttcgccatcaccgtcatcaccaccatcggctacggccacgcggcacccagcaccgatggcggcaaggtgttctgcatgttctacgcgctgctgggcatcccgctcacgctggtcatgttccagagcctgggcgagcgcatcaacaccttcgtgaagtacctgctgcaccgagccaagcgggggctgggcatgcggcgcgcagacgtgtccatggccaacatggtgctcatcggcttcttctcgtgcatcagcacgctgtgcatcggcgccgctgccttctcctactacgagcactggaccttcttccaggcctactactactgcttcatcacgctcaccaccattggcttcggcgactacgtggcattgcagaaggaccaggcgctgcagacgcagcctcagtacgtggccttcagcttcgtctacatcctcacgggcctcacggtcatcggcgccttcctcaacctcgtggtgctgcgcttcatgaccatgaacgcggaggacgagaagcgcgacgccgagcaccgcgcgctgctcacgcgcaacgggcaggcgggcggcgggggcagcgcgggcggcgcgggcggcgggggcggcagcgctcacaccaccgacaccgcctcgtccaccgcggcgggcggcggcggcggcggcttccggaatgtctacgccgaagtgctgcacttccagtccatgtgctcgtgcctctggtacaagagccgcgagaagctgcagtactccatccccatgatcatcccgcgggacctctccacgtccgacacgtgcgtcgagcagagccactcatcgccgggagggggcggccgctacagcgacacgccctcgcaccgctgtctctgcagcggggcgcagcgctccgccatcagctccgtgtctaccggcctacacagcctgtccactttccgcagcctcatgaagcgcaggagctccgtgtgaacgcccccctccggggcctggagcacctaggagcacctaggagcacgggcggggtggggcagggtgcgggggaagggggct

SEQ ID NO: 232 - protein, 402 aa, Bos taurus
MKRQNVRTLALIVCTFTYLLVGAAVFDALESEPEMIERQRLELRQQELRARYNLSQGGYEELERVVLRLKPHKAGVQWRFAGSFYFAITVITTIGYGHAAPSTDGGKVFCMFYALLGIPLTLVMFQSLGERINTFVKYLLHRAKRGLGMRRADVSMANMVLIGFFSCISTLCIGAAAFSYYEHWTFFQAYYYCFITLTTIGFGDYVALQKDQALQTQPQYVAFSFVYILTGLTVIGAFLNLVVLRFMTMNAEDEKRDAEHRALLTRNGQAGGGGSAGGAGGGGGSAHTTDTASSTAAGGGGGGFRNVYAEVLHFQSMCSCLWYKSREKLQYSIPMIIPRDLSTSDTCVEQSHSSPGGGGRYSDTPSHRCLCSGAQRSAISSVSTGLHSLSTFRSLMKRRSSV

SEQ ID NO: 233 - DNA, 1293 bp, Bos taurus
atgttcaggaccaaacgatctgcgctcgtccggcgtctctggaggagccgtgcgcccggcggcgaggacgaggaggagggcgcggggggaggcggaggaggaggcgagctgcggggagaaggggcgacggacggccgggcgcatggggccggcggcggcggcgcaggcagggctgtctgctgcctgggcaaggcggtgcgaggtgccaaaggtcacaaccatccccaccccccagccgcgggcgccggcgcggccgggggtggcgaggcggatctgaaagcgctcacgcactcggtgctcaagaaactgaaggaacggcagctggagctgctgctccaggccgtggagtcccgcggcggtacgcgcaccgcgtgcctcttgctgcccggccgcttggactgcaggctgggcctgggggcgcctgccggctcgcagccggcgcagccgccctccacctactcgctccccctcctgctgtgcaaagtgttcaggtggccggatctcaggcattcctcggaagtcaagaggctgtgttgctgtgaatcttacgggaagatcaaccccgagctggtgtgctgcaacccccatcaccttagccgactctgcgaactagccccctccccccctcctagttttctcagaattcctagtgatttctctctccttctcaaatccacagcagactgtccagatgctgtgccttcctccgctgaaacagggggaacgaattatctggcccctggggggctttcagattcccaacttcttctggagcctggggatcggtcacactggtgcgtggtggcatactgggaggagaagacgagagtggggaggctctactgtgtccaggagccttccctggacatcttctatgatctacctcaggggaatggcttttgcctcggacagctcaattcggacaacaagagtcagctggtgcagaaagtacggagcaaaatcggctgtggcatccagctcacgcgggaagtggacggcgtgtgggtgtacaaccgcagcagttaccccatcttcatcaagtcggccacactggacaacccggactccaggacgctgttggtacacaaagtgttccccggtttctccatcaaggcttttgactacgagaaggcgtacagcctgcagcggcccaacgaccacgagttcatgcagcagccgtggactggcttcaccgtgcagatcagcttcgtgaagggctggggccagtgctacactcgccagttcatcagcagctgcccgtgctggctggaggtcatcttcaacagccggtag

SEQ ID NO: 234 - protein, 430 aa, Bos taurus
MFRTKRSALVRRLWRSRAPGGEDEEEGAGGGGGGGELRGEGATDGRAHGAGGGGAGRAVCCLGKAVRGAKGHNHPHPPAAGAGAAGGGEADLKALTHSVLKKLKERQLELLLQAVESRGGTRTACLLLPGRLDCRLGLGAPAGSQPAQPPSTYSLPLLLCKVFRWPDLRHSSEVKRLCCCESYGKINPELVCCNPHHLSRLCELAPSPPPSFLRIPSDFSLLLKSTADCPDAVPSSAETGGTNYLAPGGLSDSQLLLEPGDRSHWCVVAYWEEKTRVGRLYCVQEPSLDIFYDLPQGNGFCLGQLNSDNKSQLVQKVRSKIGCGIQLTREVDGVWVYNRSSYPIFIKSATLDNPDSRTLLVHKVFPGFSIKAFDYEKAYSLQRPNDHEFMQQPWTGFTVQISFVKGWGQCYTRQFISSCPCWLEVIFNSR

SEQ ID NO: 235 - DNA, 1370 bp, Bos taurus
gacttttctcctcgcctcctcgccccgcatgttcaggaccaaacgatctgcgctcgtccggcgtctctggaggagccgtgcgcccggcggcgaggacgaggaggagggcgcggggggaggcggaggaggaggcgagctgcggggagaaggggcgacggacggccgggcgcatggggccggcggcggcggcgcaggcagggctgtctgctgcctgggcaaggcggtgcgaggtgccaaaggtcacaaccatccccaccccccagccgcgggcgccggcgcggccgggggtggcgaggcggatctgaaagcgctcacgcactcggtgctcaagaaactgaaggaacggcagctggagctgctgctccaggccgtggagtcccgcggcggtacgcgcaccgcgtgcctcttgctgcccggccgcttggactgcaggctgggcctgggggcgcctgccggctcgcagccggcgcagccgccctccacctactcgctccccctcctgctgtgcaaagtgttcaggtggccggatctcaggcattcctcggaagtcaagaggctgtgttgctgtgaatcttacgggaagatcaaccccgagctggtgtgctgcaacccccatcaccttagccgactctgcgaactagagtctccccctcctccttactccagatacccgatggattttctcaaaccaactgcagactgtccagatgctgtgccttcctccgctgaaacagggggaacgaattatctggcccctggggggctttcagattcccaacttcttctggagcctggggatcggtcacactggtgcgtggtggcatactgggaggagaagacgagagtggggaggctctactgtgtccaggagccttccctggacatcttctatgatctacctcaggggaatggcttttgcctcggacagctcaattcggacaacaagagtcagctggtgcagaaagtacggagcaaaatcggctgtggcatccagctcacgcgggaagtggacggcgtgtgggtgtacaaccgcagcagttaccccatcttcatcaagtcggccacactggacaacccggactccaggacgctgttggtacacaaagtgttccccggtttctccatcaaggcttttgactacgagaaggcgtacagcctgcagcggcccaacgaccacgagttcatgcagcagccgtggactggcttcaccgtgcagatcagcttcgtgaagggctggggccagtgctacactcgccagttcatcagcagctgcccgtgctggctggaggtcatcttcaacagccggtagccacgtggggagagggcaagcgggagccgagcgggcccagtccaaactactttgctgctaa

SEQ ID NO: 236 - protein, 426 aa, Bos taurus
MFRTKRSALVRRLWRSRAPGGEDEEEGAGGGGGGGELRGEGATDGRAHGAGGGGAGRAVCCLGKAVRGAKGHNHPHPPAAGAGAAGGGEADLKALTHSVLKKLKERQLELLLQAVESRGGTRTACLLLPGRLDCRLGLGAPAGSQPAQPPSTYSLPLLLCKVFRWPDLRHSSEVKRLCCCESYGKINPELVCCNPHHLSRLCELESPPPPYSRYPMDFLKPTADCPDAVPSSAETGGTNYLAPGGLSDSQLLLEPGDRSHWCVVAYWEEKTRVGRLYCVQEPSLDIFYDLPQGNGFCLGQLNSDNKSQLVQKVRSKIGCGIQLTREVDGVWVYNRSSYPIFIKSATLDNPDSRTLLVHKVFPGFSIKAFDYEKAYSLQRPNDHEFMQQPWTGFTVQISFVKGWGQCYTRQFISSCPCWLEVIFNSR

SEQ ID NO: 237 - DNA, 1293 bp, Bos taurus; identical to SEQ ID NO: 233

SEQ ID NO: 238 - protein, 430 aa, Bos taurus; identical to SEQ ID NO: 234

SEQ ID NO: 239 - DNA, 1857 bp, Bos taurus
atggcaaatcccagtctcaagtctgagtccctctacaggaagtgctccctgaagacaaacacactcattgcccccacaagcagcagtagccccagagccgccaaggcccctcccgcgcccagcccggctcacactgccgcccacgcccccgggccggccaatcgccccccccccccacccgcccgccccaccgccttgggagggagccgggggcgggaggcgctgcatgccctgattccggccggagccggggaccgctgcagagcgctccctccccgcgccgcgcgggcggaggagagcccgggggcgcagaacctccccgctcccgggccagggaccgcgggatccaccgcgcccacacggccaccgaggagggaatcctcctacgccgagccggaagcggcggggctggtgctggcggtagcagcggcagcggcagcggcagaggcggctggcagaggcagtggcggcggtggcggtggcggattggggggcgggggggccgcgggcgcgcgtctgttgagaagatcccttccccaggcccaccccttcccctcttccctcccccctccccccgaactttccctctcgcatgcttttcccctgcaccaccgatcgcctctcggatgccgcttgcctggaagctgcgttaggagcaagcggcggcggcggcggcggcagctcgggagtgctatgaccggcaaactcgccgagaagctgccggtgaccatgagcagtttgctaaaccaactgcctgacaatctgtaccccgaggagatccccagcgcgctcaacctcttttctggcagcagcgactcggtagcccattacaatcagatggctacagagaatgtgatggacatcggtctgaccaacgagaagcccaacccggaactctcatattcgggctccttccagccagcccccggcaacaagaccgtgacctacttgggaaagttcgccttcgactccccttccaactggtgccaggacaacatcattagcctcatgagcgccggcattttgggggtgcccccggcctctggggcactcagcacgcagacctccacggccagcatggtgcagccgccgcagggggacgtggaggccatgtatccggcgctgcccccttattctaactgcagtgatctctactcggagcctgtgtctttccacgacccccagggcaaccccgggctcgcctattctccccaggattaccagtcggccaaaccggccttggacagcaacctcttccccatgattcccgactacaatctataccaccaccccaacgacatgggctccatgccggagcacaagcccttccagggcatggaccccatccgggtcaacccgccccctattaccccgctggagaccatcaaggcattcaaagacaagcagatccacccgggctttggcagcctgccccagccgccgctcacgctcaagcccatacggcctcgcaagtaccccaaccgacctagcaagacccctctccacgagcggccacacgcgtgcccggcggagggctgcgaccgccgcttcagccgctcggacgagctgacccggcatctgcgcatccacacgggccacaagcccttccagtgcaggatctgcatgcggagcttcagccgcagcgaccaccttaccactcacatccgcacgcatacgggcgagaagccctttgcctgcgagttctgcgggcgcaagtttgcgcgcagcgacgagcgcaagcgccacgccaagatccacctcaagcaaaaggagaagaaggcggagaaggggggtgcgccttctgcgtcctcggcggccccggtgtccctggcccctgtggtcaccacctgcgcctga

SEQ ID NO: 240 - protein, 618 aa, Bos taurus
MANPSLKSESLYRKCSLKTNTLIAPTSSSSPRAAKAPPAPSPAHTAAHAPGPANRPPPPPARPTALGGSRGREALHALIPAGAGDRCRALPPRAARAEESPGAQNLPAPGPGTAGSTAPTRPPRRESSYAEPEAAGLVLAVAAAAAAAEAAGRGSGGGGGGGLGGGGAAGARLLRRSLPQAHPFPSSLPPPPELSLSHAFPLHHRSPLGCRLPGSCVRSKRRRRRRQLGSAMTGKLAEKLPVTMSSLLNQLPDNLYPEEIPSALNLFSGSSDSVAHYNQMATENVMDIGLTNEKPNPELSYSGSFQPAPGNKTVTYLGKFAFDSPSNWCQDNIISLMSAGILGVPPASGALSTQTSTASMVQPPQGDVEAMYPALPPYSNCSDLYSEPVSFHDPQGNPGLAYSPQDYQSAKPALDSNLFPMIPDYNLYHHPNDMGSMPEHKPFQGMDPIRVNPPPITPLETIKAFKDKQIHPGFGSLPQPPLTLKPIRPRKYPNRPSKTPLHERPHACPAEGCDRRFSRSDELTRHLRIHTGHKPFQCRICMRSFSRSDHLTTHIRTHTGEKPFACEFCGRKFARSDERKRHAKIHLKQKEKKAEKGGAPSASSAAPVSLAPVVTTCA

SEQ ID NO: 241 - DNA, 1857 bp, Bos taurus; identical to SEQ ID NO: 239

SEQ ID NO: 242 - protein, 618 aa, Bos taurus; identical to SEQ ID NO: 240

SEQ ID NO: 243 - DNA, 8055 bp, Bos taurus
ggggagccctagtcgcgagcggggacgaggggacctgcagccacaacttctttcgtcctctccttcccctctgtccctctacccttccccttccccatcatccagccctgactctcttggaggtactggaaggggactccgcccgcaggttgcgaagggaaccaaacttaagcggcaagttgcctcaccgtctcaagatgctcgggggtccggggcccgggctgctgctgctgctggccgtcctgtccctggggacagcggtaccctccgcgggagcctcgaagagcaggagacaggcgcagcagatcgttcagccccagtccccgctgactgtcagtcagagcaaacctggttgttatgacaatggaaagcactatcagataaaccaacaatgggagcgcacctacctgggcagcgccttggtctgtacctgttatggagggagccggggctttaattgtgagagcaagcctgaacctgaagagacttgctttgacaagtacactgggaacacttaccgggtgggtgacacttatgagcgccctaaggactccatgatctgggactgtacctgcatcggcgctgggcgaggaagaataagctgcaccattgcaaaccgctgccatgaaggggggcagtcctacaagattggtgacacctggaggagaccacacgaaactggtggttacatgttagagtgtgtgtgtctgggtaatggcaaaggagaatggacctgcaagcccatagctgagaagtgttttgatcaagctgctggtacttcctacgttgtcggggagacctgggaaaagccttatcaaggctggatgatggtggactgcacttgcctgggagaaggcagcggacgtatcacttgcacctccagaaacagatgcaacgatcaggacactaggacatcctatagaattggggatacctggagcaagaaggacaaccgggggaacctgctccagtgcatctgcacgggcaatggccgtggcgagtggaagtgtgagaggcatacatccctgcagaccacatctgcaggatctggctccttcactgatgtccgaacggccatctaccagccccagcctcatcctcagccgcctccgtatggtcactgtgtcacagacagcggtgtggtttactctgtggggatgcagtggctgaagacacaagggaataagcaaatgctttgcacttgcctgggcaacggagtcagctgccaagagacagctgtaacccagacttatggtggcaattccaacggagagccgtgcgtcctcccgttcacctacaacggtaagactttctactcctgcacgaccgaagggcggcaggacggacacctctggtgcagcacaacttccaattatgagcaagaccagaaatattctttctgtacagaccatactgttttggttcagactcgaggtggaaattccaatggtgccttgtgccactttcctttcctgtacaacaaccacaactacacggactgtacttctgagggcaggagggacaacatgaaatggtgtgggaccacgcagaactatgacgctgaccagaagtttggattctgccccatggctgcccacgaggaaatctgtacaaccaacgaaggggtcatgtatcgcattggagaccagtgggacaaacagcatgatatgggccacatgatgagatgcacatgtgttggaaatggtcgtggagaatggacatgtgtcgcctactctcagctccgagatcagtgcatcgtcgacggcatcacttacaatgtgaatgacacattccacaaacgtcatgaagagggacacatgctgaattgtacctgcttcggtcagggccggggtcggtggaagtgcgatcctgttgatcaatgtcaggattcagaaacccgcaccttttatcaaattggagactcatgggagaagtatttgcagggagtccggtaccagtgctactgctatggccgtggcattggggagtgggcctgccagcccttacagacctatccagatacaagtggtcctgtccaagtaatcatcactgagaccccaagtcaacccaactctcaccccatccaatggagcgcaccagaatcatctcacatttccaagtacattctcagatggaaacctaaaaattctccaaaccgctggaaggaagctaccattcctggccacttaaactcctacaccatcaaaggcctgaggccaggtgtggtatacgagggccagcttatcagcgtccagcactatggccaaagagaggtgacgcgcttcgactttaccaccaccagcacgagcccagcggtgaccagcaacactgtgacgggagagaccacacccttgtctcctgttgtggccacctctgagtcggtgactgaaatcacagccagcagctttgtggtttcctgggtctcggcttcggacactgtgtctggattccgggtggagtatgagctgagtgaagagggagatgaaccacagtacctggatcttcccagcacagccacttccgtgaacatccctgacctgcttcccggccgaaaatacactgtgaatgtttacgagatatccgaggaaggagagcagaatttgatcctgtctacctcacagaccacagcacctgacgcccctcctgaccctaccgtggaccaagttgatgacacttccattgtcgttcgctggagcagacccagggcgcccatcacaggatacagaatcgtctattccccatccgtagagggcagtagcacagaactcaatcttcctgaaacggccaactctgtcactctcagtgacttgcaacctggcgttcagtataacatcaccatctatgctgtggaagaaaatcaagaaagtactcccgtcttcatccagcaagaaaccactggagtcccacgttcagataaagttccccctcccagggacctgcagtttgtggaggtgacagatgtgaagatcaccatcatgtggacacccccagagagtccagtaaccggttaccgtgtggatgtgatccccgtcaacctgcctggggagcatgggcagaggctgcccgtcagcaggaacacctttgcggaagtcaccgggctgtcccctggggtcacttatcacttcaaagtcttcgccgtgaaccaggggagggagagcaagcctctgacggcacagcaggcaaccaaattggatgctcccaccaacctccagtttatcaatgaaactgataccacggttatagtgacctggactccacctcgcgcccggatagttgggtaccgactgaccgtgggcctgacccggggaggccagcccaagcagtacaacgtggggcccgcagcctcgcagtacccactgaggaacctgcagcctggctctgagtatgctgtaagcctcgtagccgtgaagggcaatcagcagagccccagagtcaccggagtcttcaccactctgcagcctctgggctctatcccacattacaacacagaggtgactgagaccaccattgtgattacatggacacctgccccaaggattggctttaagctgggtgtacgaccaagccagggaggagaagcaccccgagaagtgacttcagagtcaggaagcatcgtggtgtctggcctgactccaggtgtggaatacgtttacaccatctctgtcctcagagacgggcaagagagagatgcgccaattgtgaagaaagtggtgacaccactgtccccaccaacgaacttgcacctggaggcaaaccctgacaccggagtgcttactgtctcctgggagaggagcaccactcccgacattactggctacagaatcaccaccaccccaacaaacggccagcagggatactctctggaggaagtggtccatgccgatcagagttcctgcacctttgaaaacctgagtccgggcctggagtacaatgtcagtgtttacactgtcaaagatgacaaggaaagtgtccctatctctgataccatcatcccagctgtccctcctcccactgatttgcgatttaccaatgttggtcctgacacaatgcgtgtcacctgggctccaccctcatccattgaactgaccaacctcctggtacgctactcgcctgtgaaaaatgaggaggatgttgccgagctgtccatttctccttcagacaacgcagtggtcttaacaaatctcctgcccggcaccgagtatttagtcagcgtctccagtgtttacgagcagcatgagagcatacctcttagaggaagacagaaaaccgctcttgactccccaagtggcattgacttttctgatatcactgccaactctttcactgtccattggattgctccacgagccaccatcactggctacaggatccgccatcatcctgaaaacatgggtggaagacctcgggaagatcgagtgcccccctctcggaattccatcaccctcaccaacctgaacccaggcacagaatatgtggtcagcattgttgctcttaatagcaaagaggaaagtctgcccttggttggccaacaatcaacagtttctgatgttccaagggacctggaagtcattgctgcaacccccactagcctgctgatcagctgggatgcgcctgccgtcacagtgagatactacaggatcacctatggagaaacaggaggaagtagccctgtccaggagttcaccgtgcctgggagcaagtctacagctaccatcagtggtcttaaacctggagtggactacaccatcactgtctatgctgtcaccggccgtggggacagcccggcaagcagcaagcccgtttccatcaattaccgaacagaaattgacaaaccatcccagatgcaagtgactgatgtccaagacaacagcattagtgtcaggtggctgccttcaagttcccctgttactggttacagagtgaccactgctcctaaaaatggcccaggaccatcgaaaacgaaaactgtaggtccagatcaaacagaaatgacaattgaaggcttgcagcccacagtggagtatgtggtcagtgtctatgctcagaatcaaaacggagagagtcagcctctggttcagacagcggtaaccaacattgatcgccctaaaggactggcattcactgatgtggatgtcgattccatcaaaattgcttgggaaagcccacaggggcaagtttccaggtacagggtgacctactcgagccctgaggatggaatccatgagctattccctgcacctgatggtgaagaagagactgcagagctgcaaggcctcaggccgggttctgagtacacagtcagtgtggttgccttgcacgatgatatggagagccagcccctgattggaacccagtccacagccattcctgcaccaaccaacctgaagtttactcaggtgacaccaaccagcctgactgcccagtggacggcacccaatgttcagctcactgggtatcgagtgcgggtgaccccgaaggagaagaccggaccgatgaaagaaatcaaccttgctcctgatagctcatccgtggttgtatcaggactcatggttgccaccaaatatgaagtgagtgtctatgctcttaaggacactttgacaagcagaccggctcagggagtcgttacaactctggagaatgtcagccctccaagaagggcccgtgtgacagatgctactgagaccaccatcaccattagctggagaactaagactgagacgatcaccggcttccaagttgatgctatcccagcaaatggccagaccccaattcagagaaccatcaggccagatgtcagaagttacaccatcacaggtttacaacctggtactgactacaagatccacttgtacaccttgaatgacaatgcccggagctcccctgtggtcatcgatgcctccactgccattgatgcaccatccaacctgcgtttcctggccaccacacccaactccctgctggtatcatggcagccaccccgtgccaggattactggttacatcatcaagtacgagaagcctgggtcccctcctagagaagtggtccctcggccccgccctggtgtcacagaagctactatcactggtctggaaccaggaacagagtacacaatccaagtcattgccctcaagaacaatcagaagagtgagcctttgattgggaggaaaaagacagatgagctcccccagctggtaacccttccacaccccaatcttcatggaccagagatcttggatgttccctccacagttcaaaagacccctttcatcaccaaccctgggtatgacactggaaacggtattcagcttcccggcacttctggtcagcagcccagtcttgggcaacaaatgatctttgaggagcatggttttaggcgaaccacaccgcccaccacggccacccccgtaaggcataggccaagaccgtatccgccgaatgtaaatgaggagatccaaattggtcatgtccccaggggagacgtagaccatcatctctaccctcacgttgtgggactcaatccaaatgcttctacaggccaagaagctctctctcagacaaccatctcatggaccccattccaggaaagctctgagtatatcatttcatgtcatccagttggcattgatgaagaacccttacagttccgagttcctggaacctctgctagtgccaccttgacgggcctcaccagaggggccacctacaacatcatagtggaggcagtaaaagaccagcagaggcagaaggttcgcgaggaggtggttaccgtgggcaattctgttgaccagggcctgagtcagcccacagatgactcctgcttcgacccctacacggtctcccattatgccattggagaggagtgggagcgattgtctgattctggctttaaactctcgtgccagtgcttaggctttggcagtggtcatttcagatgcgattcatctaaatggtgccatgacaatggagtgaactacaagattggagagaagtgggatcgtcagggagagaatggccagatgatgagctgcacgtgtcttggaaatggaaaaggagaattcaagtgtgatcctcatgaggccacgtgctatgacgatgggaagacttaccacgtgggagaacagtggcagaaggaatatcttggtgccatttgctcctgcacatgctttggaggccagcggggctggcgctgtgacaactgccgcagacctggggctgaacccggtaacgaaggctccactgcccactcctacaaccagtattcccagagataccatcagagaacaaacactaatgtcaactgcccaattgagtgcttcatgcctttggatgtacaggctgacagagaagattcccgagagtaatatttccaacccagagaaacaagcgtggatctctgccaaggtccatccaaactggagtggtgttcgcagaccccatgttagtgtgttcctttcttaagccctttgctctggagtaacttctccagcttcagctcaactcacagcttctccaagcatcaccctgggagtgttttcagacttttctcatacatgggagcagtaggttatctattcttcaaaatattccatgccaatcagtattttaaatgaagtgattctaacttgtgatttggattgggatccatagggaagcacatgcaccaaccaagatacaaaatgtcttgaaatgatattaccaaaattttaagtaggaaagttacctgaacacttctgcttccacttaactgactggcccgcaatattgtaggaacagcatgtcctttgtactgtggtattcagaacagccacagtactcactttttccaaatgattctagtaattgcctagaaatatctttttcttacctgttatttatcaatttttcccagtatttttatatggaaaaaaaattgtactgaagatacttagtatgcagttgataagaggaatctggtctaattatggttggtgattattttttatactgtatgtgccaaagctttactactgtggaaagacaactgtttaataaaagatttacattccatcacttgaa

SEQ ID NO: 244 - protein, 2387 aa, Bos taurus
MLGGPGPGLLLLLAVLSLGTAVPSAGASKSRRQAQQIVQPQSPLTVSQSKPGCYDNGKHYQINQQWERTYLGSALVCTCYGGSRGFNCESKPEPEETCFDKYTGNTYRVGDTYERPKDSMIWDCTCIGAGRGRISCTIANRCHEGGQSYKIGDTWRRPHETGGYMLECVCLGNGKGEWTCKPIAEKCFDQAAGTSYVVGETWEKPYQGWMMVDCTCLGEGSGRITCTSRNRCNDQDTRTSYRIGDTWSKKDNRGNLLQCICTGNGRGEWKCERHTSLQTTSAGSGSFTDVRTAIYQPQPHPQPPPYGHCVTDSGVVYSVGMQWLKTQGNKQMLCTCLGNGVSCQETAVTQTYGGNSNGEPCVLPFTYNGKTFYSCTTEGRQDGHLWCSTTSNYEQDQKYSFCTDHTVLVQTRGGNSNGALCHFPFLYNNHNYTDCTSEGRRDNMKWCGTTQNYDADQKFGFCPMAAHEEICTTNEGVMYRIGDQWDKQHDMGHMMRCTCVGNGRGEWTCVAYSQLRDQCIVDGITYNVNDTFHKRHEEGHMLNCTCFGQGRGRWKCDPVDQCQDSETRTFYQIGDSWEKYLQGVRYQCYCYGRGIGEWACQPLQTYPDTSGPVQVIITETPSQPNSHPIQWSAPESSHISKYILRWKPKNSPNRWKEATIPGHLNSYTIKGLRPGVVYEGQLISVQHYGQREVTRFDFTTTSTSPAVTSNTVTGETTPLSPVVATSESVTEITASSFVVSWVSASDTVSGFRVEYELSEEGDEPQYLDLPSTATSVNIPDLLPGRKYTVNVYEISEEGEQNLILSTSQTTAPDAPPDPTVDQVDDTSIVVRWSRPRAPITGYRIVYSPSVEGSSTELNLPETANSVTLSDLQPGVQYNITIYAVEENQESTPVFIQQETTGVPRSDKVPPPRDLQFVEVTDVKITIMWTPPESPVTGYRVDVIPVNLPGEHGQRLPVSRNTFAEVTGLSPGVTYHFKVFAVNQGRESKPLTAQQATKLDAPTNLQFINETDTTVIVTWTPPRARIVGYRLTVGLTRGGQPKQYNVGPAASQYPLRNLQPGSEYAVSLVAVKGNQQSPRVTGVFTTLQPLGSIPHYNTEVTETTIVITWTPAPRIGFKLGVRPSQGGEAPREVTSESGSIVVSGLTPGVEYVYTISVLRDGQERDAPIVKKVVTPLSPPTNLHLEANPDTGVLTVSWERSTTPDITGYRITTTPTNGQQGYSLEEVVHADQSSCTFENLSPGLEYNVSVYTVKDDKESVPISDTIIPAVPPPTDLRFTNVGPDTMRVTWAPPSSIELTNLLVRYSPVKNEEDVAELSISPSDNAVVLTNLLPGTEYLVSVSSVYEQHESIPLRGRQKTALDSPSGIDFSDITANSFTVHWIAPRATITGYRIRHHPENMGGRPREDRVPPSRNSITLTNLNPGTEYVVSIVALNSKEESLPLVGQQSTVSDVPRDLEVIAATPTSLLISWDAPAVTVRYYRITYGETGGSSPVQEFTVPGSKSTATISGLKPGVDYTITVYAVTGRGDSPASSKPVSINYRTEIDKPSQMQVTDVQDNSISVRWLPSSSPVTGYRVTTAPKNGPGPSKTKTVGPDQTEMTIEGLQPTVEYVVSVYAQNQNGESQPLVQTAVTNIDRPKGLAFTDVDVDSIKIAWESPQGQVSRYRVTYSSPEDGIHELFPAPDGEEETAELQGLRPGSEYTVSVVALHDDMESQPLIGTQSTAIPAPTNLKFTQVTPTSLTAQWTAPNVQLTGYRVRVTPKEKTGPMKEINLAPDSSSVVVSGLMVATKYEVSVYALKDTLTSRPAQGVVTTLENVSPPRRARVTDATETTITISWRTKTETITGFQVDAIPANGQTPIQRTIRPDVRSYTITGLQPGTDYKIHLYTLNDNARSSPVVIDASTAIDAPSNLRFLATTPNSLLVSWQPPRARITGYIIKYEKPGSPPREVVPRPRPGVTEATITGLEPGTEYTIQVIALKNNQKSEPLIGRKKTDELPQLVTLPHPNLHGPEILDVPSTVQKTPFITNPGYDTGNGIQLPGTSGQQPSLGQQMIFEEHGFRRTTPPTTATPVRHRPRPYPPNVNEEIQIGHVPRGDVDHHLYPHVVGLNPNASTGQEALSQTTISWTPFQESSEYIISCHPVGIDEEPLQFRVPGTSASATLTGLTRGATYNIIVEAVKDQQRQKVREEVVTVGNSVDQGLSQPTDDSCFDPYTVSHYAIGEEWERLSDSGFKLSCQCLGFGSGHFRCDSSKWCHDNGVNYKIGEKWDRQGENGQMMSCTCLGNGKGEFKCDPHEATCYDDGKTYHVGEQWQKEYLGAICSCTCFGGQRGWRCDNCRRPGAEPGNEGSTAHSYNQYSQRYHQRTNTNVNCPIECFMPLDVQADREDSRE

SEQ ID NO: 245 - DNA, 3986 bp, Sus scrofa
gcagtcagtccggtgtttgcaaatattgtgtgggctcgagagtgcgtctccgggctccggcaggatccgaacccgcggcgcctaattgctgcgcactgagtttgcatgaacttccccggcgctgcaggcacgactgctgcgctcccgactccagaccgcacacctccctgtttttacaacagcagtgactgtcttttccaacccgacatggatgtgctcccaatgtgcagcatcttccaggaactccagattgtgcacgagactggttacttctcggcgctgccctccctggaggaatattggcaacagacctgcctggagttggagcgttacctccagagcgaaccctgctatgtgtcagcctctgaaatcaaattcgacagccaggaagacctgtggaccaaaatcatcctggcgcgggagcaaaaggaggatgcggacctgaagatgtcctccagccccccagaggatgctctcaacagccccggctttggctacaacctggagaccaacagcctgaactcggacgtgagcagcgaatcgtccgacagctccgaggagctgtcccccaccaccaagtttacctccgaccccatcggcgaagttttagtcacttcggggaacctgagctcctccgtcacctccacgcccccttcttcgccagaactgagcagggagccgtctcacctgtggggctgtgtgcccggcgagctgcacccgccggggaaggcgcgcagcgggactgcggggaagccaggcgacaagggcagcggggacgcgtccccggacggccgcagaagggtgcatcggtgccactttaacggctgccggaaagtttacaccaaaagctcccacttgaaagcacatcagcgcacccacacaggagaaaagccttacagatgctcatgggaagggtgtgagtggcgttttgcaagaagcgatgagttaaccagacacttcagaaagcacactggtgccaagccttttaaatgttcccactgtgacaggtgtttctccaggtccgaccacctggccctgcacatgaagaggcacctctgaaggggcggagcggcgactcctgcgagctaaaaaggcttccaggctgagacggccgaggaaggagggtgcgtgttccagccgaagccattttgcaccctacccggtcgcctccaggacccactgggaaggtctcgcgagggcggaaacgtcgtgtcagaagcggcagagcacccgtggtgtgtggtgtttgggtggccctggcctcgccacgggtcccatcttccgagtggtccctaagcctttgccgtgagcatgtgcactgagaatggtagtggttgggtgggctgtacgtggagggtctcccacggactgtgtgatggggcgagtcctttcccttgcgaggctgcaagagagacaaaagcgtcgtttgaatgttttgtgtgtgaggcgtgttccctgagatgaggagttgaccaccaatcatttcctgggggaggggggggggtgtctgcgccttagagggaaaaatagaaaaagaaaaaaagaaggggagctgtggagggacgagtgggcgggcaggacccccgagtggcgagtgggtgtggggagggccccccccgcgaggcgggagaacttgggtgtccagctacgacacgtgccatgtgtgaagtgagtagcatctgctcctcgctgcgacagagttcattcgttacccgttgtataagctgtgtatctacaaatataacacattgataacttttccttataagacaagagtaatgcatggtctggggaattatctgcttttccattttttaaaaaaaatcaggactacggttttgattccagttcactgagcagctacgataggatcggtcgaagtcggcggcccctcgccatccgggccttttcggtttggaacaccccccttccagaaaggcgttgggcagcgtaagactgttttttaaatggttccgaattgaattacctttttggagaatttcgtgatgccctgggaagacattggacactgctgggtgtcccgggcccgagggctgggagttgctggtctgacgccacgtcagactcagacccccacatttttctcagttgggtggatgaaaccactaaagcttagaaactgttttctcatgcagctaagtttctcttatttatgccttgaggactaacttctggttttctagctgttaatgcactgtagatcttaataatggtgccttatgcaagcggccccttatgcgggggtcttatacaggggtatgggtgatgcatgctttattaaggctcttttttcacctggctttgtactgtatcgataaataacacagaaaaaaatctctttgaggtcctccttcacaaagtcacgtaaacgaaaaccccccaaacgagtcagtatttactccatagtttaggcaacttgactgtcagtgttacagtggaaaacacgtgataattggaaaatcagaccatttctgccaccgtgagactttcatatagactttgcacaacgattgtatagctcatacaccggctgtgtttaatatgtaacattttcacatgtataaaagatacagacgtttaaaaacaatgtatttgcttaaaaggcacaagtttctcgcatatctatgtagctatctgttggtaacagaaagtctattactcttttcctaaactgggcgaaattcttgtgtatgtgtatttgtgcgtatactatgtgtatgtgtgtgtgtgtgtgtgtgtgtgtgtgtatacatatatatatagataatatataaatatttttttaaggagaaattagaatggttagctagaaaattccacagcctatgaagacatacttcaaaatggccataaaggagataaaaatgaaaactgtaactttgaaaaaggctttatctttaatttaacgatttgctacaggctattggcatcaagtctattctagactgccagcttgttcatcacaattggcaggtctggatggggtacctttggccgttcagaactggcatgaacggaacactagcccactggttgctctcagacacaccaagttttgattttgaatgtcaaccttattgaagatctaacctaagagtaagctaatcacagggattcttttttagagcactttttatgcagatgaagctattttttccagcacatagattcttccaggttttccaacgagtaatttccccgaattggcataccgcagtgtggacagctgactcttcatccagctgctggcttgtgggtgtggagcttttctttatatatatttatatatatatatatatatatacacatatgagtctggctgggctggtattttgtttgatcttcctggaaatgagcaacggtgacagctcacataactggttttttttggggttttttttgttgtttgttttttgttttaatctgggctgatggatacttactaaagaattcatttcattttgctgaggggaaaatgcacttttcttttggcagttccatatccagccacttggtttgctggatttgggaaaactccttttttggccctgctgtgtgcttagccataacaattccattaagcaagaaggtaaacaaaagacaaaaaaaaaaaaaaatcttgcactggcttgtctcacttacgaaacaccgtgaagtggtttgattgggtggggctgggtgccatgtatgtccatgcctgtaattttcataataagcaaagtacataaagaattacattctgttcaggtgataactgagcctcaatcaagcagaaactttttgcttgacattaaaaaaaatttctattagtgaaatttctttttttttttttgaagcaccctgttatctaaagaatctttgtaagatttttgtaaaattttgttttacaagattttatttgaaattgttttttgcaagattgttatatttctgtatgaatgtattttttattggaataacataaa

SEQ ID NO: 246 - protein, 283 aa, Sus scrofa
MDVLPMCSIFQELQIVHETGYFSALPSLEEYWQQTCLELERYLQSEPCYVSASEIKFDSQEDLWTKIILAREQKEDADLKMSSSPPEDALNSPGFGYNLETNSLNSDVSSESSDSSEELSPTTKFTSDPIGEVLVTSGNLSSSVTSTPPSSPELSREPSHLWGCVPGELHPPGKARSGTAGKPGDKGSGDASPDGRRRVHRCHFNGCRKVYTKSSHLKAHQRTHTGEKPYRCSWEGCEWRFARSDELTRHFRKHTGAKPFKCSHCDRCFSRSDHLALHMKRHL

SEQ ID NO: 247 - DNA, 780 bp, Sus scrofa
atgctgcccctgtgcctcgtggccgcgctgctgctgtcggcctccgggccccggccgagcctgggcgacgaagccatccactgcccgccctgctccgaagagaagctggcgcgctgccgcccccccgtgggctgcgaggagctggtgcgagagccgggctgcggctgttgcgccacttgcgccctgggcaaagggatgccctgcggggtgtatacaccccgctgtggctctggcctgcggtgctacccgccccggggcgtggagaagcccctgcacacgctgatgcacgggcaaggcctgtgcatggagctggcagagatcgaggccatccaggaaagcctgcagccctctgacaaggacgagggtgaccaccccaacaacagcttcagcccctgcagcccccaagaccgcaggtgcctgcagaagcacttggccaagatccgagaccggagcaccagtgggggcaagatgaaggtcatcggggcacctcgggaggaagcccggcctgtgccccagggctcctgccagagtgagctgcaccgggccctggagcggctggccgcctcgcagagacgcacccatgaggacctctacatcatccccatccccaactgcgaccgcaacggcaacttccaccccaagcagtgccacccggccctggatggtcagcgcggcaagtgctggtgtgtggaccggaagacgggagtgaagcttccggggggcctggagccgaagggggagctggattgccaccagctggccgacagcttccgagagtga

SEQ ID NO: 248 - protein, 259 aa, Sus scrofa
MLPLCLVAALLLSASGPRPSLGDEAIHCPPCSEEKLARCRPPVGCEELVREPGCGCCATCALGKGMPCGVYTPRCGSGLRCYPPRGVEKPLHTLMHGQGLCMELAEIEAIQESLQPSDKDEGDHPNNSFSPCSPQDRRCLQKHLAKIRDRSTSGGKMKVIGAPREEARPVPQGSCQSELHRALERLAASQRRTHEDLYIIPIPNCDRNGNFHPKQCHPALDGQRGKCWCVDRKTGVKLPGGLEPKGELDCHQLADSFRE

SEQ ID NO: 249 - DNA, 567 bp, Sus scrofa
tacaaggttaagatgcacatcacatcctcttcgcatctcttctacttggccctgtgcttgctctccttcaccagctctgccacggctggacctgagaccctctgtggggctgagctggtggacgctcttcagttcgtgtgcggagacaggggcttttatttcaacaagcccacagggtacggctccagcagtcggagggcgccacagacgggcatcgtggatgagtgctgcttccggagctgtgatctgaggaggctggagatgtactgtgcacccctcaagcctgccaagtcggcccgctccgtccgtgcccagcgccacacggacatgcccaaggctcagaaggaagtacatttgaagaacacaagtagagggagttcaggaaacaagaactacagaatgtaggaagaccttcctgaagagtgaagaatgacatgccactggcaggatcctttgctctgcacgagttacctgttaaacaccagaagacctaccaaaaaaataagtttgaaaacatttcaaaagatgggcattccccccaatgaaatacacaagtaaacattcccg

SEQ ID NO: 250 - protein, 130 aa, Sus scrofa
MHITSSSHLFYLALCLLSFTSSATAGPETLCGAELVDALQFVCGDRGFYFNKPTGYGSSSRRAPQTGIVDECCFRSCDLRRLEMYCAPLKPAKSARSVRAQRHTDMPKAQKEVHLKNTSRGSSGNKNYRM

SEQ ID NO: 251 - DNA, 879 bp, Sus scrofa
ttcatggcggttccggggtctccacatttttcccggttgtggttctaatctgtcccaagcggaggcggcggagcttgaggttcttgctggtgtgaaatgactgagtacaaactggtggtggttggagcaggtggtgttgggaaaagcgcactgacaatccagctaatccagaaccactttgtagatgaatatgatcccaccatagaggactcttaccgaaaacaggtggttatagatggtgaaacctgcctgttggacatactggatacagctggacaagaggagtacagtgccatgagagaccaatacatgaggacaggcgaaggcttcctttgtgtatttgccatcaataatagcaaatcatttgcagatattaacctctacagggaacagattaagcgtgtaaaagactcagatgatgtacctatggtgctagtaggaaacaagtgtgatttgccaacaaggactgttgacacgaaacaagcccatgaactggccaagagttatgggattccattcattgaaacctcagccaaaaccagacagggtgttgaagatgccttttacacactggtaagagaaatacgtcagtaccgaatgaaaaaactcaacagcagtgatgatgggactcaaggttgtatggggttgccatgtgtggtgatgtaacaagatacttttaaaattctagcatcagaaaagagccactgtcaagctgcactgacaccctggtcctgacttccctggaggagaagtattcctgttgctatcttcagtctcacaaagaagctcctgctactttcccaactctcagtagatcagtataatattctctatttgagaagttctcagaataactacctcctcacttggttgtctgac

SEQ ID NO: 252 - protein, 189 aa, Sus scrofa
MTEYKLVVVGAGGVGKSALTIQLIQNHFVDEYDPTIEDSYRKQVVIDGETCLLDILDTAGQEEYSAMRDQYMRTGEGFLCVFAINNSKSFADINLYREQIKRVKDSDDVPMVLVGNKCDLPTRTVDTKQAHELAKSYGIPFIETSAKTRQGVEDAFYTLVREIRQYRMKKLNSSDDGTQGCMGLPCVVM

SEQ ID NO: 253 - DNA, 1632 bp, Sus scrofa
cggcacgaggagaagcaggcgagatgaagactctgctgctcttggtggggctgctgctgacctgggagaatggcccctgggtgctgggggacaaggccatctcggacaaagagctccaggaaatgtccaccgaggggagtaagtacgttaataaagaaattaaaaatgccctcaaggaggtgaaacagataaagaccctaatagaacaatcaaatgaagagcgcaaatcactgctcagctccctggaggaagccaagaagaagaaagaggatgccctgaacgataccagggataccgagacaaagctgaagggatcccagggcttgtgcaatgagacgatgatggccctgtgggaagagtgcaagccctgcctgaaacagacctgcatgaagttctacgcgcgtgtctgcaggagcggctcgggactggttggccaccagctcgaggagttcctgaaccagagctcccccttctacttctggatcaacggtgaccgcatcgactccctgatggagaacgaccgccagcagagccacgtgatggacatcatggaggacagcttcaaccgggcgtccaacattatggatgagctcttccaggaccgcttctttaaccgggagcctttcgacactcagttcttctcaccctttggctcatcccacaggggctcgctcttcttcaaccccaagtcccgcttcgcccggaacatcatgcctttccccctgttcacagacctgaattaccatgacatgttccagcccttcttcgacatgatccaccaggcccagcaggccatggatgcccaccttcatagaattccctatcacttccctgaggcgggagtcccagaaaacagcaatgaccgagctgtgtgcaaggagatccgccacaactccacgggatgcctgaggatgaaggaccagtgtgagaagtgccgggagatcttgtcagttgactgttcggccagcaattcctctcagatgcagctgcgtcaggagctgtacacgtccctgcagatggcggagaagttcagcaagctctacgaccagctgctccagtcctaccagcagaagatgcttaacacgtcctccctgctgaagcagctcaacgagcagttcagctgggtgtcccagctggccaacctcacgcagaatgacgaccgctactatctccaggtcaccacggtgaattcccacggctccgaccccagcgtgccctctggcctcactaaggtggtggtgaagctctttgattcctaccccatcactctgattatcccgcaggaagtctccgatcctaaattcatggagactgtggcggaggaagcgctacagcagtaccgccaaaggagccgggaggagtgagaggtgaatctcacgtttctaaggatggggggcatctgcgtccagttgccccctgagttgagccataggcctctagagagagctctgcgtgtcaccagctgaccaggccctggcgccaggccctcctgaccccacccagcctctcctccctctggattctgcacgctaacacctgcctttgctgatcacaggaagaaatttcccgtgtgccactaactcagtaaaccgccttggaatctgaaggctcaaaaaaaaaaaaaaaaaaaaa

SEQ ID NO: 254 - protein, 446 aa, Sus scrofa
MKTLLLLVGLLLTWENGPWVLGDKAISDKELQEMSTEGSKYVNKEIKNALKEVKQIKTLIEQSNEERKSLLSSLEEAKKKKEDALNDTRDTETKLKGSQGLCNETMMALWEECKPCLKQTCMKFYARVCRSGSGLVGHQLEEFLNQSSPFYFWINGDRIDSLMENDRQQSHVMDIMEDSFNRASNIMDELFQDRFFNREPFDTQFFSPFGSSHRGSLFFNPKSRFARNIMPFPLFTDLNYHDMFQPFFDMIHQAQQAMDAHLHRIPYHFPEAGVPENSNDRAVCKEIRHNSTGCLRMKDQCEKCREILSVDCSASNSSQMQLRQELYTSLQMAEKFSKLYDQLLQSYQQKMLNTSSLLKQLNEQFSWVSQLANLTQNDDRYYLQVTTVNSHGSDPSVPSGLTKVVVKLFDSYPITLIIPQEVSDPKFMETVAEEALQQYRQRSREE

SEQ ID NO: 255 - DNA, 966 bp, Sus scrofa
atggaccgcaccgtggtgctcatcaccggctgttcctccggcatcggcctgcacctggccctgcgtctggcatctgacccatctcagagcttcaaagtgtacgccaccctaagggacttgacggcacaaggcccgctgttggaggctgcccaggcccgagggtgccccccgggctccctggagaccttgcagctggatgtgcgggatgcagattcaatagcggatgcccgggcacacgtgaccgagggacgcgtggatgtgctggtgtgcaacgcaggccggggcctggtggggcccctggaggcacacagggagggcgctgtggactccgtgctggatgtgaacctggccggcaccgtgcggatgatgcaggcctttctgccggacatgaagcggcgccgctcgggtcgcatattggtgaccgggagcctgggaggcctgatagggcttcccttcaacgctgtttactgcgccagcaagtttgcaatcgaaggcttatgcgagagtctggcggttgtgctgcagagcttcggggtccacgtgagcgtcatcgagtgcggcccggtgcgtactgccttccccgagaagctggaggacggcctgggcgggatactggatcgcgcggacgccgagacccgtgacctcttctcccgctacctgagccacttcgagcagacgttccttgaggcggcgcaggacccggaggaggtggtcgaggtcttcctccaggctctgcgcgcgccgcgcccggctctgcgctacttcaccaccgagcacttccatcccctgatcaagctgcgcttctccgaccccagcagcagcagctacgtcgcagccgagcaccaaagagtgttcggcgaccaggccaccgagggcttcgagggcactgattgcggcgaggcggaggcgggagctggagacctggggccgtctgagctcggcgctcctcttgccaccccgcaataa

SEQ ID NO: 256 - protein, 321 aa, Sus scrofa
MDRTVVLITGCSSGIGLHLALRLASDPSQSFKVYATLRDLTAQGPLLEAAQARGCPPGSLETLQLDVRDADSIADARAHVTEGRVDVLVCNAGRGLVGPLEAHREGAVDSVLDVNLAGTVRMMQAFLPDMKRRRSGRILVTGSLGGLIGLPFNAVYCASKFAIEGLCESLAVVLQSFGVHVSVIECGPVRTAFPEKLEDGLGGILDRADAETRDLFSRYLSHFEQTFLEAAQDPEEVVEVFLQALRAPRPALRYFTTEHFHPLIKLRFSDPSSSSYVAAEHQRVFGDQATEGFEGTDCGEAEAGAGDLGPSELGAPLATPQ

SEQ ID NO: 257 - DNA, 1386 bp, Sus scrofa
tcgtcccagtccctgctttccagcccggcccctgccccgccctgacccaaaccggcccagacgccatggagagctggccctggccgtcgggcggcgcctggctgctcgtggcggcccgtgcgctgctgcagctgctgcgcgcagacctgcgtctgggccgcccgctgctggcggcgctggcgcttctggccgcgctcgactggctgtgccagcgcctgctgcccccgctggccgcacttgtcgtgctggctgccgcgggttggatcgcgttgtcccgcttggcgcggccgcaacgcctgccggtggcgactcgcgcggtgctcatcaccggctgtgactccggttttggcaaagcgactgccaagaagctggatgccatgggcttcacagtgctggccaccgtgttggagttggatagccctggtgcccaagagctgcgtgcttgctgttcccctcgtctgaagttgctgcagatggacctgaccaagccagcagacattagccgcgtgctggagttcaccaaggtccacactgccagcacaggtctgtggggcctggtcaacaatgcaggccacaacatccttgtggcagatgcagagctgtctccagtggccacgtaccgcagctgcatggaggtgaatttttttggtacccttgagatgaccaaagccctcttgccactgctgcgccggtcgagcggtcgcattgtgactgtgagcagtccagcaggagatatgccatttccgtgcttgtctgcctacgggacctccaaagcggctgtggcattgctcatggactctttcagctgtgaacttcagccctggggggtcaaggtcagcgtcatccagcctgcctgcttcaggacggaggcagtgaaaaacgtggaccagtgggaagagcgcaagcggcagctgctggccactctgccccaagagctgctacaggcctatggtgaggactacatcgagcacttgaatgggcaatttctgcactctctgagccaggggctgccagacctcagcccggttgtagatgccatcactgacgcactgctggcggctaagccgcgccaccgctattaccctggccatggcctggggctcatgtacttcatccactactacctgccagagggcctgcgacgccgtttcctgcagtccttcttcatcagtccctatgtgcccagagcactgaggcttggccagcccagccatacctctgcccaggatccaggcccaaacctgggctctgcccccaccgctcaatgagcagcgcgcacatagagcgcctccatcagaggaggtcccatgtccttggccctcccctgggcattctatccctcaggtctgccctagagcctggcctaaaggatcccaaccccactca

SEQ ID NO: 258 - protein, 400 aa, Sus scrofa
MESWPWPSGGAWLLVAARALLQLLRADLRLGRPLLAALALLAALDWLCQRLLPPLAALVVLAAAGWIALSRLARPQRLPVATRAVLITGCDSGFGKATAKKLDAMGFTVLATVLELDSPGAQELRACCSPRLKLLQMDLTKPADISRVLEFTKVHTASTGLWGLVNNAGHNILVADAELSPVATYRSCMEVNFFGTLEMTKALLPLLRRSSGRIVTVSSPAGDMPFPCLSAYGTSKAAVALLMDSFSCELQPWGVKVSVIQPACFRTEAVKNVDQWEERKRQLLATLPQELLQAYGEDYIEHLNGQFLHSLSQGLPDLSPVVDAITDALLAAKPRHRYYPGHGLGLMYFIHYYLPEGLRRRFLQSFFISPYVPRALRLGQPSHTSAQDPGPNLGSAPTAQ

SEQ ID NO: 259 - DNA, 853 bp, Sus scrofa
gtaacttagcggaaacttctcagagaatgctccaaaactcagcagtgcttctggtgctggtgatcagtgcttctgcaacccatgaggcggagcagaatgattctgtgagccccaggaaatcccggttggcaggtcagaactcagttgaaatggttcgctgcctcaacagcgctctgcaggttggctgtggagcttttgcctgcctggaaaactccacctgtgacacagatgggatgtacgacatctgtaaatccttcttgtacagcgctgctaaatttgacactcagggaaaagcctttgtcaaagagagtttaaagtgcatcgccaacggggtcaccgccaaggtcttcctcgccattcggagatgctctactttccagcggatgattgccgaggtgcaggaggagtgctacaccaagctgaacgtgtgcagtgtcgccaagcggaaccccgaagccatcacggaagtcgtccagctccccaatcacttctccaacagatactacaacagacttgttcgcagcctgctggaatgtgacgaagacacggtcagcaccatcagagacagcctgatggagaaaattgggcccaacatggccagcctcttccacatcctgcagacggatcactgtgcccacacgcaccagcgagctgacttcaacagaaaacgtgccaacgagccacagaagctgaaagtcctcctcaggaacctccgaggtgaggtggcctcccccgcccacatcaaacgcacctcccacgagagtgcgtaaccgggggcgaggtgttcacagcctcaccaaactactatcattttaagggtgttcacgcaccacgtttgagtgtactgtgcctg

SEQ ID NO: 260 - protein, 248 aa, Sus scrofa
VMLQNSAVLLVLVISASATHEAEQNDSVSPRKSRLAGQNSVEMVRCLNSALQVGCGAFACLENSTCDTDGMYDICKSFLYSAAKFDTQGKAFVKESLKCIANGVTAKVFLAIRRCSTFQRMIAEVQEECYTKLNVCSVAKRNPEAITEVVQLPNHFSNRYYNRLVRSLLECDEDTVSTIRDSLMEKIGPNMASLFHILQTDHCAHTHQRADFNRKRANEPQKLKVLLRNLRGEVASPAHIKRTSHESA

SEQ ID NO: 261 - DNA, 1849 bp, Sus scrofa
tgggagcagggagagtagcagtggtaggggcagcatgctggccagggggcttgccctccgctcagtcctggtcaaaggctgccagcccttcctgagtgcccctcgggagtgcccagggcatcccagggtgggcactggagagggagcatgcatctccactaaaacccctcgccccttcagtgagatcccctctcctggtgacaatggctggattaacctgtaccgtttctggaaggagaagggcacacagaaaatccactatcaccatgtccagaacttccagaagtatggtcccatttacagggagaagctcggcaacttggaatctgtttatatcatcgaccctgaagatgtggcccttctctttaagttcgaaggacccaacccagaacgatacaacatcccgccctgggttgcctatcaccagcattaccagaagcctgttggggtcctgctgaagaagtcaggagcctggaagaaagaccggttggtcctgaacacggaggtaatggctccagaggccataaagaacttcatccccctactggacacagtgtctcaggacttcgtcggcgtcctgcacaggcgcatcaagcagcagggttctggaaagttctcaggtgacatcagggaagacctgtttcgcttcgcctttgagtccatcaccaatgtcatatttggagagcgcctggggatgctggaggaaatagtggaccctgaggctcagaagttcattgatgctgtctaccagatgttccacactagtgtccccatgctcaatctcccccctgacctgttccgtctgttcaggaccaagacctggagggaccatgtagccgcatgggacactattttcaataaagctgaaaaatacacccagaacttctactgggacctgagacggaaaagagaatttaacaattacccaggcatcctctaccgcctcctgggaaatgacaagctgctctcagaagatgttaaggccaatgttaccgagatgctggcagggggtgtagacacgacatccatgactctgcaatggcacttgtatgagatggcacgtagcctgaatgtgcaggagatgctgcgggaggaggtcctcaatgcccggcgccaggcccaaggagacacaagcaagatgctgcaattggtcccactcctcaaagctagcattaaggagacactgagactccaccccatctccgtgaccctgcagagatacctcgtgaatgacttggttcttcgagattacatgattcctgccaagacattggtacaagtggccgtctatgccatgggccgagaccccgccttcttctcaaatccaggccagtttgacccaacccggtggttgggtaaagaaagggacctcatccacttccggaacttgggctttggctggggcgtgcggcagtgtgtgggccggcggatcgctgagctcgagatgactctcttcctcatccatattctggagaacttcaaggttgaattgcagcacttcagtgatgtggacaccatattcaacctcatcctgatgccggacaagcccatcttccttgttttccggcccttcaatcaggatccactccaggcatgatcggagagggtgggcaacccatttcctaccaaccaggctagcaggggtgtgggaggatggcctgatggggtggggcccatggaagtgtctgtaccaccagtgctcggtccctacccctgctcctttctggccagctctggtcagataaagttggtgctcagtaatcagctgctccagttcagctgaggcaccccttctttcactccacttcttcatccactcccatgaaggcaataaatagctgaactatgt

SEQ ID NO: 262 - protein, 520 aa, Sus scrofa
MLARGLALRSVLVKGCQPFLSAPRECPGHPRVGTGEGACISTKTPRPFSEIPSPGDNGWINLYRFWKEKGTQKIHYHHVQNFQKYGPIYREKLGNLESVYIIDPEDVALLFKFEGPNPERYNIPPWVAYHQHYQKPVGVLLKKSGAWKKDRLVLNTEVMAPEAIKNFIPLLDTVSQDFVGVLHRRIKQQGSGKFSGDIREDLFRFAFESITNVIFGERLGMLEEIVDPEAQKFIDAVYQMFHTSVPMLNLPPDLFRLFRTKTWRDHVAAWDTIFNKAEKYTQNFYWDLRRKREFNNYPGILYRLLGNDKLLSEDVKANVTEMLAGGVDTTSMTLQWHLYEMARSLNVQEMLREEVLNARRQAQGDTSKMLQLVPLLKASIKETLRLHPISVTLQRYLVNDLVLRDYMIPAKTLVQVAVYAMGRDPAFFSNPGQFDPTRWLGKERDLIHFRNLGFGWGVRQCVGRRIAELEMTLFLIHILENFKVELQHFSDVDTIFNLILMPDKPIFLVFRPFNQDPLQA

SEQ ID NO: 263 - DNA, 2588 bp, Sus scrofa
gaaagatataaagaagggtcacaacaagacaggactttaaattgcttcctctgagatcaagcaatgcaagatggttttggaaatgctgaacccaatgcattataaagtcaccagcatggtgtctgaagttgtgccttttgccagcattgcagtcctgctgctcactggctttcttctcttggtttggaattataaaaacacatcttcaataccaggtcctggctattttctgggaattgggcccctaatttcctacctcagattcctctggatggggattggcagtgcctgcaactactacaacaaaacgtatggagaattcataagagtctggataggtggagaagaaacactcattattagcaagtcctcaagtgtgttccatgtaatgaagcatagtcactacacatcccgatttggcagcaaacctgggttgcagttcattggcatgcatgagaaaggcattatattcaacaataatccagtcctctggaaagctgttagaacttattttatgaaagctctgtccggccctggcctggtgcgcatggtgaccgtctgtgccgattccatcaccaagcacctggacaagctggaggaggtccgcaatgacttgggctacgtggacgtgttgaccctcatgcggcgcatcatgctggacacctctaacaacctcttcctggggatcccactggacgaaaaggccattgtgtgtaaaatccagggttattttgatgcatggcaagctctccttctcaaaccagacatcttctttaagattccttggctgtacagaaagtatgaaaagtctgtaaaggatttgaaagaggacatggaaattctgatagaaaaaaaaagacgcaggattttcacagcagaaaaactggaagactgcatggatttcgccactgagttgattttggctgagaaacgtggtgaactgacaaaagagaatgtgaaccagtgcatactggaaatgctaattgcagcaccagacaccatgtctgtcactgtgttcttcatgctgtttctcattgcaaagcacccccaggttgaagaggaactaatgaaggaaatccagactgttgttggtgaaagagacataaggaatgatgacatgcaaaaactcgaagtggtggaaaactttatttatgagagcatgaggtaccagcctgtcgtggacctcgtcatgcgaaaagccttagaggatgatgtcatcgatggctacccggtgaaaaagggaaccaacattatcctgaatattggaagaatgcatagactcgagtttttccccaagcccaatgaatttactcttgagaactttgccaagaatgttccttacaggtacttccagccatttggctttgggccccgggcctgtgcgggaaagtatatcgccatggtcatgatgaaggtcactctggtcatacttctgagacgcttccaagtgcagacaccgcaagaccggtgtgttgaaaagatgcagaagaaaaatgatttatccttgcacccggatgagaccagcggcctgctggaaatgattttcatcccaagaaattcagacaagtgtttcactaaataaaattggtcagtccctgccctggaccagttctcaacagtattccacatggaaaccacccatctttgctagctaatcctcctcacatgaacattctgtggcctattgtgttttatcagcttacctcctctgtgttatcagcataccagatgcactgttctcctaagcatattcaagccagaaaccagactgcaaagaacatatggaggccaagagtttgtgcaagaaactatagccttaaaggaccatttccacaaaacaggttttggaaaaatggagacatcaacaaactcattctcatctcttctctgttctactgtgagaagggaaccttttaatgtctggggcagaggcactcaagttgattagaaaggtccagctaacatctggatacctatggccaaacatacatggtaatttgatttggggtttggtgggatttggggactacaacatccgaagccttgaagaaatgcttacaaattcagcatgtgaccttttctataaattatattcaattaacacttatttattcacatgtgatttatctgcagcaaaagttaaatcagagaatagacttgtggctgcctcaggggagaggaagggagtggggggaatcgggagcttggggttaatggatgcaatctattgctcttggaatggatttacaatgagatcatgctgtgtagcattgagaactatgtctagatacttacatcgcaacacaacagtgggaggaaaaagtatgtatacatgtatgtgtaacttggtccccatgctgtacaacggaaataaataaattaattaattaaaaaaaaaagttacatcaaagagcatccttccccaatgtctcaatttatgcctcaaccagaccatatctctgctatggggggaaaaaaatcacaaaatgtgtttcaaatttaaataaaattctttttttatgttgcattgttaaaaaaaacaaaaaaaaaaaaaaaaaaaaaaaaaaaaaaaaaaaaaaaaaaaaaaa

SEQ ID NO: 264 - protein, 503 aa, Sus scrofa
MVLEMLNPMHYKVTSMVSEVVPFASIAVLLLTGFLLLVWNYKNTSSIPGPGYFLGIGPLISYLRFLWMGIGSACNYYNKTYGEFIRVWIGGEETLIISKSSSVFHVMKHSHYTSRFGSKPGLQFIGMHEKGIIFNNNPVLWKAVRTYFMKALSGPGLVRMVTVCADSITKHLDKLEEVRNDLGYVDVLTLMRRIMLDTSNNLFLGIPLDEKAIVCKIQGYFDAWQALLLKPDIFFKIPWLYRKYEKSVKDLKEDMEILIEKKRRRIFTAEKLEDCMDFATELILAEKRGELTKENVNQCILEMLIAAPDTMSVTVFFMLFLIAKHPQVEEELMKEIQTVVGERDIRNDDMQKLEVVENFIYESMRYQPVVDLVMRKALEDDVIDGYPVKKGTNIILNIGRMHRLEFFPKPNEFTLENFAKNVPYRYFQPFGFGPRACAGKYIAMVMMKVTLVILLRRFQVQTPQDRCVEKMQKKNDLSLHPDETSGLLEMIFIPRNSDKCFTK

SEQ ID NO: 265 - DNA, 966 bp, Sus scrofa
atggtgctcaccgcggtcctcctgctgctggccgcctgtgccggaccggcccagggcctgggctccttcgtgcactgcgagccctgcgacgagaaagccctctccatgtgcccccccagcccccttggctgtgagctggtcaaggagcctggctgcggctgctgcatgacctgcgccctggcggaggggcagtcgtgcggcgtctacactgagcgctgcgcccaggggctgcgctgcctcccccggcaggacgaggagaagccgctgcacgccctgctgcacggccgcggggtttgcctcaacgaaaagagctaccgcgagcaagccaagatcgagagagactcccgcgagcacgaggagccgaccacttccgagatggcggaggagacctactcgcccaagatcttccgacccaagcacacccgcatctccgagctgaaggcagaggccgtgaagaaggaccgcagaaagaagctgacccagtccaagttcgtggggggagctgagaacaccgcccaccctcgagtcatcttggcgcctgagatgagacaggaatctgagcagggtccctgccgcaggcacatggaggcttccctgcaggagctcaaagccagcccgcgcatggtgccccgcgcggtgtacctgcccaactgtgaccgcaagggattctacaagagaaagcagtgcaagccttcccgtggccgcaaacgtggcatctgctggtgcgtggacaagtacgggatgaagctgccaggcatggagtacgtggacggggacttccagtgccacagcttcgacagcagcaacgttgagtgatgcgtcccctccccatccttcctccctgccccatcccgcccccagccccaactccagccagcgcctccctccaccccaagacgccactcatttcatctcatttaaggggaaaaaaatacatatatctatctatttgagggaactgaggac

SEQ ID NO: 266 - protein, 271 aa, Sus scrofa
MVLTAVLLLLAACAGPAQGLGSFVHCEPCDEKALSMCPPSPLGCELVKEPGCGCCMTCALAEGQSCGVYTERCAQGLRCLPRQDEEKPLHALLHGRGVCLNEKSYREQAKIERDSREHEEPTTSEMAEETYSPKIFRPKHTRISELKAEAVKKDRRKKLTQSKFVGGAENTAHPRVILAPEMRQESEQGPCRRHMEASLQELKASPRMVPRAVYLPNCDRKGFYKRKQCKPSRGRKRGICWCVDKYGMKLPGMEYVDGDFQCHSFDSSNVE

SEQ ID NO: 267 - DNA, 1757 bp, Sus scrofa
cccccggcctccgggagactggcgcatgccacggagcgcccctcgggccgccgccgctcctgcccgggcccctgctgctgctgctgtcgcctgcgcctgctgccccaactcggcgcccgacttcttcatggtgtgcggaggtcatgttcgctccttagccggcaaacgacttttctcctcgcctcctcgccccgcatgttcaggaccaaacgatctgcgctcgtccggcgtctctggaggagccgtgcgcccggcggcgaggacgaggaggagggcgcgtggggaggcggtggaggaggcgagctgcggggagaaggggcgacggacggccgggcacatggggccggtggcggcggcgcaggcagggctggctgctgcctgggcaaggcggtgcgaggtgccaaaggtcaccaccatccccaccccccagccgcgggcgccggcgtggccgggggcgccgaggcggatctgaaggcgctcacgcactcggtgcttaagaaactgaaggaacggcagctggagctgctgctccaggccgtggagtcccgcggcggtacgcgcacggcgtgcctcttgctgcccggccgcctggactgcaggctgggcctgggggcgcctgccggctcacagcccgcgcagccgccctcgtcctactcgctccccctcctgctgtgcaaagtgttcaggtggccggatctcaggcattcctcggaagtcaagaggctgtgttgctgtgaatcttacgggaagatcaaccccgagctggtgtgctgcaacccccatcaccttagccgactctgcgaactagagtctccccctcctccttactccagatacccgatggattttctcaaaccaactgcagactgtccagatgctgtgccttcctccgctgaaacagggggaacgaattatctggcccctggggggctttcagattcccaacttcttctggagcctggggatcggtcacactggtgcgtggtggcatactgggaggagaagacgagagtggggaggctctactgtgtccaggagccctccctggatatcttttatgatctacctcaggggaatggcttttgccttggacagctcaattcggacaacaagagtcagctggtgcagaaagtgcggagcaagatcggctgtggcatccagctcacgcgggaagtggatggcgtgtgggtgtacaaccgcagcagttaccccatcttcatcaagtcagccacactggacaacccggactccaggacgctgttggtacacaaagtgttccccggtttctccatcaaggcttttgactatgagaaagcgtacagcctgcagcggcccaacgaccacgagttcatgcagcagccgtggactgggttcaccgtgcagatcagcttcgtgaagggctggggccagtgctacacccggcagttcatcagcagctgcccatgctggctggaggtcatcttcaacagccggtagcctcgtgggggagaggacagagcgggagccgagcgggcccagtccaaactactttgctgctaagattttcctcctgagtgcttgcttttcatgcaaactctttggtcattttttttttccttcctctcgtcgttcttgtttatgttatgttttgttttgttctttgagaaatagcttatgaaaagaattgttggttttttttttttttttttttcctcttcggggcgggttggggcgggggcaggggtgggcagtggtaaggttggcagaacacccagatc

SEQ ID NO: 268 - protein, 426 aa, Sus scrofa
MFRTKRSALVRRLWRSRAPGGEDEEEGAWGGGGGGELRGEGATDGRAHGAGGGGAGRAGCCLGKAVRGAKGHHHPHPPAAGAGVAGGAEADLKALTHSVLKKLKERQLELLLQAVESRGGTRTACLLLPGRLDCRLGLGAPAGSQPAQPPSSYSLPLLLCKVFRWPDLRHSSEVKRLCCCESYGKINPELVCCNPHHLSRLCELESPPPPYSRYPMDFLKPTADCPDAVPSSAETGGTNYLAPGGLSDSQLLLEPGDRSHWCVVAYWEEKTRVGRLYCVQEPSLDIFYDLPQGNGFCLGQLNSDNKSQLVQKVRSKIGCGIQLTREVDGVWVYNRSSYPIFIKSATLDNPDSRTLLVHKVFPGFSIKAFDYEKAYSLQRPNDHEFMQQPWTGFTVQISFVKGWGQCYTRQFISSCPCWLEVIFNSR

SEQ ID NO: 269 - DNA, 1098 bp, Sus scrofa
atggtgtcctcggggcctccacatcctaagaaaggcaccaaatctggcagcagttgtgcccacccgtcctcgcagagctgtaagaattacaagagatttcaggggaaggattatgcaataccagggaaggtggcacaaacgatttcaaaggagaagcctcttggctttctcttcaatggagtgttcaggcatggagaccgaagtcccattgaaacctttcctaaggaccctattaaggaatcctcatggccacaaggatttggacaactcactcagctgggcatggagcaacattatgaacttggagaatatatcaggaaacgatatgaaaaattcttgaacgagtcctataaacatgaacaggtttatgttcgaagcacagatattgaccgaacgttgatgagtgcaatgacaaaccttgcaggcctatttcctccagaaggcatcagcatctggaaccccaacctactttggcagcccatcccagtgcacacagtccctctttctgaagatcagttgctatacctgccattcaggaactgccctcgttttcaagaacttgagagtgagactttgaaatcggaggaattccagaagaggctgcatccttataaggattttatagaaaacttgcccaaactaacaggataccatggccagaacctttttggaatttggagtaatgtctacgaccctttattttgtgagcatgacactaccgtgagtgccctacagatggcgctagatgtttacaacggaatccttcctccctatgcatcctgccacttaatggaactgtacttcgagaagggggaatactttgtagagatgtactatcggaatgagacttggcatgaaccacatcccctcacgctaccaggatgcacccccagctgccctctgaagaagtttgctgagctggttgcccctgtgatcccccaagactggtccgcagagtgtgccacgagcagccatgaagttctaaagatcatccttgccgttgtcttttgcctggtgtctggtatcctaatggtgctgctgtttaccctcatccgccacgggccctgctggcagagagactcctatgggaacatttaa

SEQ ID NO: 270 - protein, 365 aa, Sus scrofa
MVSSGPPHPKKGTKSGSSCAHPSSQSCKNYKRFQGKDYAIPGKVAQTISKEKPLGFLFNGVFRHGDRSPIETFPKDPIKESSWPQGFGQLTQLGMEQHYELGEYIRKRYEKFLNESYKHEQVYVRSTDIDRTLMSAMTNLAGLFPPEGISIWNPNLLWQPIPVHTVPLSEDQLLYLPFRNCPRFQELESETLKSEEFQKRLHPYKDFIENLPKLTGYHGQNLFGIWSNVYDPLFCEHDTTVSALQMALDVYNGILPPYASCHLMELYFEKGEYFVEMYYRNETWHEPHPLTLPGCTPSCPLKKFAELVAPVIPQDWSAECATSSHEVLKIILAVVFCLVSGILMVLLFTLIRHGPCWQRDSYGNI

SEQ ID NO: 271 - DNA, 3573 bp, Sus scrofa
aagaagtggcggcacaagtcgagcgcccccaaacgctcgatccccctggagagctgcttcaacatcaacaagcgggcggattccaagaacaagcacctggtggccctctacacccgggacgagcactttgccatcgcggcggacagcgaggccgaacaggacagctggtaccaggccctcctgcagctgcacaaccgtgccaagggccaccacgacggggccgcaggccctggggcgggaggcggtgggggcagctgcagtggcagctctggcctcggcgaggctggggaggacttgagctatggggacgtgcccccaggacccgccttcaaggaggtttggcaggtgatcctgaaacccaaaggcctgggtcagacaaagaacctgattggcatctaccgcctctgcctgaccagcaagaccatcagtttcgtgaagctgaactcggaggcggcggctgtggtgctgcagctgatgaacatcaggcgctgtggccactcagagaacttcttcttcatcgaagtgggccgttctgcagtgacgggacccggggagttttggatgcaggtggatgattctgtggtggcccagaatatgcatgagacaatcctggaggccatgcgggccatgagcgatgagttccgccctcgaagcaagagccagtcctcctctaactgctccaaccccatcagtgtacctctgcgcaggcaccacctcaacaaccctccgcccagccaggtggggctgacccgccgctcacgcacagagagcatcactgccacctccccggccagcttggtgggcgggaagcagggctccttccgcgtccgtgcgtccagtgatggcgaaggcaccatgtctcgccccgcctctgtggatggcagtcctgtgagccctagcaccaacaggactcacgcccaccggcatcgaggcagctcccggctgcacccgcctcttaaccacagccgctctattcccatgccttcttctcgctgctcaccctccgccaccagcccggtcagcctgtcgtccagcagcaccagcggccatggctccacctcggactgtctcttcccgcggcggtctagtgcttctgtgtccgggtcccccagtgacggcggtttcatctcttccgatgagtatggctctagcccctgtgatttccgaagctccttccgcagtgtcacgccagattccctgggccacaccccgcccgcccgcggtgaggaggagctgagcaactacatctgcatggggggcaagggggcctccaccctcgctgcccccaatggccactacattttgcctcggggtggcaatggccaccgctgcctcccaggagctggcttgggcacgagcccagccctgaccggggaggaagcaggccctgcatctgatctggataaccggttccgaaagcggactcactctgctggcacatcccctactatttcccaccagaagaccccatcccagtcctctgtggcttccattgaggaatatacagagatgatgccggcctacccaccaggaggtggcagtggaggccggatgcccaactaccggcactccgccttcgtgcccacccactcctaccctgaggagggtctggaaatgcaccccttggagcggcgtgggggtcaccaccgccaagacacctccagcctccacaccgatgatggctacatgcccatgtccccaggagtagccccagtgcccggcacccgaaagggcagtggggactacatgcccatgagccccaagagcgtgtctgccccgcagcagatcatcaaccccatcagacgccatccccagagagtggaccccaatggctacatgatgatgtcccccagcggcagctgctctcctgacattggaggtggtcccagcagcgggggcagcagcagcggtgccgccccttctgggagcagctatggcaagttatggacaaatggggtagggggccaccactctcacgccctgccacaccccaaactccctgtggagagcagtagtggcaagctcttgtcttgtacaggtgactacatgaacatgtcgccagtgggggactccaacaccagcagcccttccgactgctactatggccccgaagatccccagcacaagccagtcctctcctactactcgttgccaaggtccttcaagcacacgcagcgccccggggagctggaggagagcgccaggcaccagcacctccgcctttcctccagctccggtcggcttctctatgctgcggcagcagaagattcgtcgtcatccaccagcagcgacagcctgggcgggggatactgtggggctaggcccgagcccggcctcccgcatctccatcatcaggtcctgcagccccatctgcctcgaaaggtggacacagcagcccagaccaacaaccgcctggctcggcccacgaggctgtccctgggggatcccaaggccagcaccttacctcgggcccgagagcagccgccgcagccggccctgctgcaccctccggaacccaaaagtccaggggaatatgtgaatattgaatttgggggcgatcagccgggctacttatcaggcccggtggcgtcccacagcgcgccttcggtgagatgttcatcgcagctccagccagctcccagagaagagaacactggcgccgaagagtacatgaacatggacctggggccaggccggagggcgatctggcaggagagcgctggggtccagcctggcagggtgggccccgcccccccgggagctgctagcgtgtgcaggccgacccgggcggtgcccagcagccggggtgactacatgaccatgcagatgggttgtccccgtcagagctacgtggacacctcgccagtggcccccatcagctatgccgatatgcggaccggcatcgtcgtggaggaggccagccttcccggggccacagcggctgctccctcggcgtcctcggccacctctgcttcctccgccgcgccccaaggagcaggggagctggcggcctgctcttccctgctggggggcccgcagggacccgggggcctgagcgccttcacacgggtgaatctcagtcccaaccgcaaccagagtgccaaagtgatccgtgccgaccctcaagggtgcaggaggcggcacagctccgagaccttctcctcgacacccagtgccacccgggcgggcaacacggtacccttcggagggggagctgcagtcgggggcggcggtggtggcagcagcagcactgaggctgtgaaacgccacagctctgcctccttcgagaacgtgtggctgaggcctggggagcttgggggagcccccaaggagctggcccagatgtgcggagcagctgggggtttggagaatggtcttaactacatagacctggatttggtcaagaacttcaaacagcgccctcaagagcgcccccctcaaccgcagcctcctccaccccctcctcctcatcagcctctgggcaacagtgagagcagctccaccagccgctccagcgaggatttaagcgcctatgccagcatcagtttccagaagcagccagaggaccgtcag

SEQ ID NO: 272 - protein, 1191 aa, Sus scrofa
KKWRHKSSAPKRSIPLESCFNINKRADSKNKHLVALYTRDEHFAIAADSEAEQDSWYQALLQLHNRAKGHHDGAAGPGAGGGGGSCSGSSGLGEAGEDLSYGDVPPGPAFKEVWQVILKPKGLGQTKNLIGIYRLCLTSKTISFVKLNSEAAAVVLQLMNIRRCGHSENFFFIEVGRSAVTGPGEFWMQVDDSVVAQNMHETILEAMRAMSDEFRPRSKSQSSSNCSNPISVPLRRHHLNNPPPSQVGLTRRSRTESITATSPASLVGGKQGSFRVRASSDGEGTMSRPASVDGSPVSPSTNRTHAHRHRGSSRLHPPLNHSRSIPMPSSRCSPSATSPVSLSSSSTSGHGSTSDCLFPRRSSASVSGSPSDGGFISSDEYGSSPCDFRSSFRSVTPDSLGHTPPARGEEELSNYICMGGKGASTLAAPNGHYILPRGGNGHRCLPGAGLGTSPALTGEEAGPASDLDNRFRKRTHSAGTSPTISHQKTPSQSSVASIEEYTEMMPAYPPGGGSGGRMPNYRHSAFVPTHSYPEEGLEMHPLERRGGHHRQDTSSLHTDDGYMPMSPGVAPVPGTRKGSGDYMPMSPKSVSAPQQIINPIRRHPQRVDPNGYMMMSPSGSCSPDIGGGPSSGGSSSGAAPSGSSYGKLWTNGVGGHHSHALPHPKLPVESSSGKLLSCTGDYMNMSPVGDSNTSSPSDCYYGPEDPQHKPVLSYYSLPRSFKHTQRPGELEESARHQHLRLSSSSGRLLYAAAAEDSSSSTSSDSLGGGYCGARPEPGLPHLHHQVLQPHLPRKVDTAAQTNNRLARPTRLSLGDPKASTLPRAREQPPQPALLHPPEPKSPGEYVNIEFGGDQPGYLSGPVASHSAPSVRCSSQLQPAPREENTGAEEYMNMDLGPGRRAIWQESAGVQPGRVGPAPPGAASVCRPTRAVPSSRGDYMTMQMGCPRQSYVDTSPVAPISYADMRTGIVVEEASLPGATAAAPSASSATSASSAAPQGAGELAACSSLLGGPQGPGGLSAFTRVNLSPNRNQSAKVIRADPQGCRRRHSSETFSSTPSATRAGNTVPFGGGAAVGGGGGGSSSTEAVKRHSSASFENVWLRPGELGGAPKELAQMCGAAGGLENGLNYIDLDLVKNFKQRPQERPPQPQPPPPPPPHQPLGNSESSSTSRSSEDLSAYASISFQKQPEDRQ

SEQ ID NO: 273 - DNA, 1269 bp, Sus scrofa
cccctgcaccacggatcgcctctcggatgccgcttgcctggaagctgcgttaggagcgagcggcggcggtggcggcggtggcggcggcggcagctcgggagtgctatgaccggcaaactcgccgagaagctgccggtgaccatgagcagtttgttaaaccaactgcctgacaatctgtaccccgaggagatccccagcgcgctcaacctcttttctggcagcaccgactcggtagcccattacaatcagatggctacagagaatgtgatggacatcggtctgaccaacgagaagcccaacccggaactctcttattcgggctccttccagccagcccccggcaacaagaccgtgacctacttgggaaagttcgccttcgactccccttccaactggtgccaggacaacatcattagcctcatgagcgccggcatattgggggtgcccccggcctcaggggcgctcagcacgcagacctctacggccagcatggtgcagccgcctcagggcgaagtggaggccatgtatccggcgctgcccccctattctaactgcagtgatctctactcggagcctgtgtctttccacgacccccaaggcaaccctgggctggcctattccccgcaggattaccaatcggccaaaccggccttggacagcaatctcttccccatgattcctgactacaacctataccaccaccccaacgacatgggctccattccggagcacaagcctttccagggcatggaccccatccgggtcaacccgccccctattacccccttggagaccatcaaggcattcaaagacaagcagatccacccgggctttggcagcctgccccagccgccgctcacgctcaagcctatccggccccgcaagtaccccaaccgacccagcaagaccccgctccacgagaggccccacgcgtgcccggcggagggctgcgaccgccgtttcagccgctcggacgagctgacccggcacctgcgcatccacacgggccacaagccctttcagtgtcggatctgcatgcggagcttcagccgcagcgaccaccttaccactcacatccgcacgcatacgggcgagaagccctttgcctgcgagttctgtgggcgcaagtttgcgcgcagcgacgagcgcaaacgccacgccaagatccacctcaagcaaaaggagaagaaggcagagaaggggggtgcgccttctgcgtcctcggcggccccggtatccctggctcctgtggtcaccacctgcgcctga

SEQ ID NO: 274 - protein, 422 aa, Sus scrofa
PLHHGSPLGCRLPGSCVRSERRRWRRWRRRQLGSAMTGKLAEKLPVTMSSLLNQLPDNLYPEEIPSALNLFSGSTDSVAHYNQMATENVMDIGLTNEKPNPELSYSGSFQPAPGNKTVTYLGKFAFDSPSNWCQDNIISLMSAGILGVPPASGALSTQTSTASMVQPPQGEVEAMYPALPPYSNCSDLYSEPVSFHDPQGNPGLAYSPQDYQSAKPALDSNLFPMIPDYNLYHHPNDMGSIPEHKPFQGMDPIRVNPPPITPLETIKAFKDKQIHPGFGSLPQPPLTLKPIRPRKYPNRPSKTPLHERPHACPAEGCDRRFSRSDELTRHLRIHTGHKPFQCRICMRSFSRSDHLTTHIRTHTGEKPFACEFCGRKFARSDERKRHAKIHLKQKEKKAEKGGAPSASSAAPVSLAPVVTTCA

SEQ ID NO: 275 - DNA, 7841 bp, Sus scrofa
tgcagggggggaggagagggagccctaggcgcgagcgggagagaggggacctgcagccacaacttctttcttcctctccttcccctctgtccctctacccttccccttccccatcatccagcccttaccttcttggcggcgtcggcccgtagcgggcactggaagggactcctctggcaggttgcgaaaaagaagtcaaacttggtggaaagttgtctcctggttagagcgtctatatccccgcaccttctcaagatgctcgggggtccaggacccgggcttctgctgctggccgtcctgtccctggggacaacggtgccctccactggagcgtcgaagagcaagaggcaggctcagcagatcgttcagccccaatccccgttggttgacagccaacgcaagcctggttgttacgacaatggaaaacactatcagataaaccaacaatgggagcgcacttacctgggcagtgccttggtttgtacctgttatggagggagccggggcttcaactgtgagagcaagcctgagcctgaagagacctgctttgacaagtacactgggaacacttaccgggtgggcgacacttatgagcgccctaaagactccatgatctgggactgtacctgcattggagctgggcgaggcagaataagttgcaccattgcaaaccgctgccatgaagggggtcagtcctacaagattggtgacacttggaggagaccgcatgagactggtggttacatgttagagtgtgtgtgtcttggtaatgggaaaggagaatggacctgcaagcccatagctgagaaatgttttgatcacgcggctggagggacttcctacgttgtcggggagacctgggaaaagccttatcagggctggatgatggtggattgtacttgtctgggagaaggcagtggacgtatcacctgcacctctagaaacagatgcaacgatcaggacaccagaacatcctatagaattggggatacctggagcaagaaggacaatcgggggaacctgctccagtgcatctgcacaggcaacggccgtggggagtggaagtgtgagaggcacacatctctgcagaccacatctgctggatctggctccttcacagatgtccgaacagccatttaccagccccagcctcacccccagcctgctccatatggtcactgtgtcacagacagcggtgtggtttattccgtggggatgcagtggctgaagacacaaggaaataagcaaatgctttgcacttgcctgggcaatggagtcagctgccaagagacagctgtcacccagacttacggtggcaactccaacggggagccatgcgtcctcccgttcacctacaatggcaggaccttctactcctgcaccacagaagggcgacaggacggacatctctggtgcagcacgacttccaattatgaacaagaccagaaatattctttctgtacagaccatactgttctggttcagactcgaggtggaaattccaatggtgctttgtgccactttcccttcctgtacaacaaccgaaactacaccgactgtacttccgagggcagaagggacaacatgaaatggtgtggaaccacacagaactatgacgctgaccagaagtttggattctgccccatggctgcccatgaggaaatctgtacaaccaacgaaggagtcatgtatcgcatcggagatcagtgggacaaacagcatgatatgggtcacatgatgagatgcacatgtgttgggaacggtcgcggggaatggacatgtgttgcttactcacagctccgagatcagtgcattgttgacgatatcacatacaatgtgaatgacacgttccacaaacgtcacgaggagggacacatgctgaactgcacctgctttggtcagggtcggggccgatggaagtgcgatcccgttgaccaatgccaggattcggaaacccgcaccttttatcaaattggagactcatgggagaagtatgtgcatggggtcaggtaccagtgctactgctatggccgaggcattggagagtggcactgccaacccttacagacctatccaggcacaactggtcctgtccaagtgatcatcactgagacccccagtcagcccaactcgcaccccatccaatggaatgcaccagaaccatctcacatttccaagtacattctcagatggaaacctaaaaattctccaaaccgttggaaggaagccaccattccaggccacttgaactcatacaccatcaagggcttgcggccaggtgtggtatacgagggccagctcatcagcgtccagcactacggccacagagaggtgactcgcttcgacttcaccaccaccagcacaagctcagcagtgaccagcaacaccgtggtgggagagacaacacccttttctcctgttgtggccacttccgaatcagtgacggaaatcacagccagcagctttgtggtctcctgggtctcggcatcggacactgtgtcaggattccgggtggagtatgagctgagcgaggagggcgatgaaccacagtacctggatcttcccagcacagccacttctgtgaacatccctgacctgcttcctggccgaaaatacattgtgaatgtctatcagatatccgaagaaggagagcagagtttgattctgtccacttcgcagacaacagcccctgatgctcctcctgaccctactgtggaccaagttgatgacacctcgattgtcgttcgctggagcagaccccaggcacctatcacaggctatagaatcgtctattccccgtctgtagaaggtagtagcacagaactcaaccttcctgaaactgccaactctgtcactctcagtgacttgcaacctggtgttcagtataacatcacaatctatgctgtggaagaaaatcaagaaagtacccctgtcttcatccagcaagaaaccactggcgtcccacgtccagataaagtgccccctcccaaggacctgcagtttgtggaagtgacggacgtgaaggtcaccatcatgtggacaccccccgagagcccggtgaccggttaccgcgtggacgtgatccccgtcaacctgcctggcgagcatgggcagaggctgcccatcagcaggaacacctttgcagaagtcaccgggctgtcccctggagtcacctaccacttcaaagtcttcgccgtgaaccaggggagggagagcaagcctctgacagcacaacagacaaccaaattggatgctcccaccaacctccagtttatcaacgaaacggactcaaccgtcatggtgacctggacgccacctcgcgccaggatagccgggtaccgattgactgtgggcctgacccggggaggccagcccaagcagtacaacgtggggccctcagcctcgcagtacctactaaggaatctgcagcctggctctgagtatgctgtgaccctcgtggccgtaaaaggcaaccagcagagccccagagccactggcgtcttcaccactctgcagcctgtgggctccattccaccttacaacacagaggtgactgagaccaccattgtgatcacatggacccctgccccaaggatcggctttaagctgggtgtacgaccaagccagggaggggaagcaccacgagaagtgacttcagactcgggaagcatcgttgtgtccggcctgactccaggcgtggaatacgtttacaccatctcagtcctgagagacgggcaagaaagagataccccaattgtgaagaaagtggtgacaccactgtctccaccaacaaacttgcacctggaggcaaaccctgacactggagtgcttaccgtctcctgggagaggagcaccaccccagacattactggctatagaattaccaccacccctacaaatggccagcagggatattctttggaagaagtggtccatgcagatcagagttcctgcacctttgaaaacctaagccctggcctggagtacaatgtcagtgtttatactgtcaaaaatgacaaggaaagtgttcctatctctgataccatcatcccagctgtccctcctcccactgacctgcgatttaccaatgttggtcctgatacgatacgtgtcacctgggctccacctccatccattgaactgaccaacttcctggtgcgctactcccctgtgaaaaatgaggaggatgtggcagagctgtccatttctccttcagacaacgcagtggtcctcacaaatctgctgcctggcacagagtatttagtcagcgtctccagtgtctatgagcagcatgaaagcatacctctcagaggaagacagaaaacaggtcttgattccccaactggcattgacttctctgatatcaccgccaactctttcactgtgtactggattgctcctcgcgccaccatcactggctacaagatccgccatcaccctgagcacatgggtggaagacctcgggaagatcgcgtgcccccctctcggaattccatcaccctcaccaacctcattccaggcgtggaatatgtggtcagcatcgtcgctgttaatggcagagaggaaagccctcccttggtcggccaacaatcaacagtttctgatgttccaagggacctgcaagtcattgccacaacccccactagcctgttgatcagctgggatgctcctgctgtcacagtgagatattacaggatcacgtatggagaaacaggaggaaatagccctgtccaggagttcactgtgcctgggagcaagtctacagctaccatcagtggccttaagcctggagtagactacaccatcaccgtctatgctgtcactggccgtggggacagcccagcaagcagcaagcccgtttccattgattatcgaacagaaattgataaaccatcccagatgcaagtgactgatgtccaggacaacagcatcagtgtcaggtggctgccttcaagttcccatgttactggttacagagtgaccactactcctaaaaatggctcaggaccatcaaaaacgaaaactgttggtccagatcaaacagaaatgacaatagaaggcttgcagcccacagtggagtatgtggttagtgtctacgctcagaatcaaaacggagagagtcagcctctggttcagacagcggtaaccaccattcctgcaccaaccaacctgaagttcactcaggtaacacccacaagcctgactgcccagtggacagcccccaacgttcagctcactgggtatcgagtgcgggtgacccccaaggagaagaccgggccaatgaaggaaatcaaccttgctcctgatagctcctctgtggtcgtatcaggactcatggtggccaccaagtatgaagtgagcatctatgctcttaaggacactttgacaagcagaccagctcagggagttgtcacgaccctggagaatgtcagtcctccaagaagggcccgggtgacagatgctactgagaccaccatcaccattagctggaggaccaagactgagacgatcaccggcttccaagttgatgccgtcccagccaatggccagactccaatccagagaaccatcaagccagatgtcaggagctacaccatcacaggtttacaacccggcactgactacaagatctacttgtacaccctgaatgacaatgcccggagctcccctgtggtcatcgatgcctccactgccatcgatgcaccatccaacttgcgtttcctggccaccacacccaattccttgttggtatcatggcagccaccccgtgccaagattactggttacatcatcaagtatgagaagcctgggtcccctcccagagaagtggtccctcggccccgccctggtgtcacagaagctactattactggtctggaaccagcaaccgagtacacaatccaggtcattgccctcaagaacaatcagaagagtgagcctctgatcgggaggaaaaggacagatgagcttccccaactggtaacccttccacaccccaatcttcatggaccagagatcttggatgttccctccacagttcaaaagacccctttcgtcaccaaacccgggtatgacactggaaacggtattcagcttcctggcacttctggtcagcagcccagtcttgggcaacaaatgatctttgaggagcatggttttaggagaaccacaccgcccacaacggccacccccgtaaggcataggccaggaccgtatacgccgaatgtaaatgaggagatccaagttggtcatgtccccaggggagacgtagaccatcacctctaccctcacgttctgggactcaatccaaatgcttctacaggacaagaagctctctctcagacaaccatctcatggaccccattccaggaaagctctgaatatatcatttcatgtcatcccgtgggcattgatgaagaacccttgcagttccgagttcctggaacttctgctagtgccaccttgacgggtctcaccagaggtgccacctacaacatcatagtggaggcactaaaagaccagaagaggcacaagattcgggaggaggtggttactgtgggcaattctgttgaccaaggcctaagccaacccacggatgactcgtgcttcgacccctacacggtttcccattatgccatcggagaagagtgggagcgattatctgaatctggctttaagctctcgtgccagtgcttaggctttggcagtggtcatttcagatgtgattcatctaaatggtgccatgacaatggtgtgaattacaagattggagagaagtgggatcgtcagggagagaatggccagatgatgagctgcacatgtctcggaaatggaaaaggagaattcaagtgtgatccccatgaagcgacgtgttatgatgatgggaagacataccatgtgggagaacagtggcagaaggaatatctcggtgccatttgctcctgcacgtgctttggaggccagcggggctggcgctgtgacaactgccgcagaccaggggctgaactcggtcccgaaggctccaccgggcactcctacaaccagtattcacagagataccatcagagaacaaacaccaatgtcaactgcccaattgagtgcttcatgcctttagatgtacaggctgacatagaagattcccgagagtaaaatttccaagctggagaaacaagcacggatctctgccaaggtccatccaaactggagtgatgttagcagaccccatcccagtttgtttctttcttaagccctttgctctggagtaatttcttcagcttcagctcaactcacagcttctccaagcatcaccctgggagtgttttgagacttttctcataaatggcagtacatggcctgctctccaaagtgttcagtaccgctcaatattttaaatgaaatgattctaacttgtgatctgaattgggatcagtagggttgcacatgtaccaaccaagatgcaaaatgtcttgaaatgatattaccaaaaattttaagtaggaaagttacccaaacacttctgcttccacttaactgtctggcccgcaatattgtaggaacagcatatccttgttactgtgatatttaaaatatccacagtactcactttttccagatgactttggtaattgcctagaaatatctttctcttacctgttatttatcaatttttcccagtatttttatatggaatcaaattgtattgaagacagttagtaggcagttgataagaggaatttggtataattatggttggtgattattttttatactgtacgtgccaaagctttactactgtggaaagacaactgtttagtaaaagatttacattccacaattttaat

SEQ ID NO: 276 - protein, 2297 aa, Sus scrofa
MLGGPGPGLLLLAVLSLGTTVPSTGASKSKRQAQQIVQPQSPLVDSQRKPGCYDNGKHYQINQQWERTYLGSALVCTCYGGSRGFNCESKPEPEETCFDKYTGNTYRVGDTYERPKDSMIWDCTCIGAGRGRISCTIANRCHEGGQSYKIGDTWRRPHETGGYMLECVCLGNGKGEWTCKPIAEKCFDHAAGGTSYVVGETWEKPYQGWMMVDCTCLGEGSGRITCTSRNRCNDQDTRTSYRIGDTWSKKDNRGNLLQCICTGNGRGEWKCERHTSLQTTSAGSGSFTDVRTAIYQPQPHPQPAPYGHCVTDSGVVYSVGMQWLKTQGNKQMLCTCLGNGVSCQETAVTQTYGGNSNGEPCVLPFTYNGRTFYSCTTEGRQDGHLWCSTTSNYEQDQKYSFCTDHTVLVQTRGGNSNGALCHFPFLYNNRNYTDCTSEGRRDNMKWCGTTQNYDADQKFGFCPMAAHEEICTTNEGVMYRIGDQWDKQHDMGHMMRCTCVGNGRGEWTCVAYSQLRDQCIVDDITYNVNDTFHKRHEEGHMLNCTCFGQGRGRWKCDPVDQCQDSETRTFYQIGDSWEKYVHGVRYQCYCYGRGIGEWHCQPLQTYPGTTGPVQVIITETPSQPNSHPIQWNAPEPSHISKYILRWKPKNSPNRWKEATIPGHLNSYTIKGLRPGVVYEGQLISVQHYGHREVTRFDFTTTSTSSAVTSNTVVGETTPFSPVVATSESVTEITASSFVVSWVSASDTVSGFRVEYELSEEGDEPQYLDLPSTATSVNIPDLLPGRKYIVNVYQISEEGEQSLILSTSQTTAPDAPPDPTVDQVDDTSIVVRWSRPQAPITGYRIVYSPSVEGSSTELNLPETANSVTLSDLQPGVQYNITIYAVEENQESTPVFIQQETTGVPRPDKVPPPKDLQFVEVTDVKVTIMWTPPESPVTGYRVDVIPVNLPGEHGQRLPISRNTFAEVTGLSPGVTYHFKVFAVNQGRESKPLTAQQTTKLDAPTNLQFINETDSTVMVTWTPPRARIAGYRLTVGLTRGGQPKQYNVGPSASQYLLRNLQPGSEYAVTLVAVKGNQQSPRATGVFTTLQPVGSIPPYNTEVTETTIVITWTPAPRIGFKLGVRPSQGGEAPREVTSDSGSIVVSGLTPGVEYVYTISVLRDGQERDTPIVKKVVTPLSPPTNLHLEANPDTGVLTVSWERSTTPDITGYRITTTPTNGQQGYSLEEVVHADQSSCTFENLSPGLEYNVSVYTVKNDKESVPISDTIIPAVPPPTDLRFTNVGPDTIRVTWAPPPSIELTNFLVRYSPVKNEEDVAELSISPSDNAVVLTNLLPGTEYLVSVSSVYEQHESIPLRGRQKTGLDSPTGIDFSDITANSFTVYWIAPRATITGYKIRHHPEHMGGRPREDRVPPSRNSITLTNLIPGVEYVVSIVAVNGREESPPLVGQQSTVSDVPRDLQVIATTPTSLLISWDAPAVTVRYYRITYGETGGNSPVQEFTVPGSKSTATISGLKPGVDYTITVYAVTGRGDSPASSKPVSIDYRTEIDKPSQMQVTDVQDNSISVRWLPSSSHVTGYRVTTTPKNGSGPSKTKTVGPDQTEMTIEGLQPTVEYVVSVYAQNQNGESQPLVQTAVTTIPAPTNLKFTQVTPTSLTAQWTAPNVQLTGYRVRVTPKEKTGPMKEINLAPDSSSVVVSGLMVATKYEVSIYALKDTLTSRPAQGVVTTLENVSPPRRARVTDATETTITISWRTKTETITGFQVDAVPANGQTPIQRTIKPDVRSYTITGLQPGTDYKIYLYTLNDNARSSPVVIDASTAIDAPSNLRFLATTPNSLLVSWQPPRAKITGYIIKYEKPGSPPREVVPRPRPGVTEATITGLEPATEYTIQVIALKNNQKSEPLIGRKRTDELPQLVTLPHPNLHGPEILDVPSTVQKTPFVTKPGYDTGNGIQLPGTSGQQPSLGQQMIFEEHGFRRTTPPTTATPVRHRPGPYTPNVNEEIQVGHVPRGDVDHHLYPHVLGLNPNASTGQEALSQTTISWTPFQESSEYIISCHPVGIDEEPLQFRVPGTSASATLTGLTRGATYNIIVEALKDQKRHKIREEVVTVGNSVDQGLSQPTDDSCFDPYTVSHYAIGEEWERLSESGFKLSCQCLGFGSGHFRCDSSKWCHDNGVNYKIGEKWDRQGENGQMMSCTCLGNGKGEFKCDPHEATCYDDGKTYHVGEQWQKEYLGAICSCTCFGGQRGWRCDNCRRPGAELGPEGSTGHSYNQYSQRYHQRTNTNVNCPIECFMPLDVQADIEDSRE

SEQ ID NO: 277 - DNA, 8384 bp, Sus scrofa
tgcagggggggaggagagggagccctaggcgcgagcgggagagaggggacctgcagccacaacttctttcttcctctccttcccctctgtccctctacccttccccttccccatcatccagcccttaccttcttggcggcgtcggcccgtagcgggcactggaagggactcctctggcaggttgcgaaaaagaagtcaaacttggtggaaagttgtctcctggttagagcgtctatatccccgcaccttctcaagatgctcgggggtccaggacccgggcttctgctgctggccgtcctgtccctggggacaacggtgccctccactggagcgtcgaagagcaagaggcaggctcagcagatcgttcagccccaatccccgttggttgacagccaacgcaagcctggttgttacgacaatggaaaacactatcagataaaccaacaatgggagcgcacttacctgggcagtgccttggtttgtacctgttatggagggagccggggcttcaactgtgagagcaagcctgagcctgaagagacctgctttgacaagtacactgggaacacttaccgggtgggcgacacttatgagcgccctaaagactccatgatctgggactgtacctgcattggagctgggcgaggcagaataagttgcaccattgcaaaccgctgccatgaagggggtcagtcctacaagattggtgacacttggaggagaccgcatgagactggtggttacatgttagagtgtgtgtgtcttggtaatgggaaaggagaatggacctgcaagcccatagctgagaaatgttttgatcacgcggctggagggacttcctacgttgtcggggagacctgggaaaagccttatcagggctggatgatggtggattgtacttgtctgggagaaggcagtggacgtatcacctgcacctctagaaacagatgcaacgatcaggacaccagaacatcctatagaattggggatacctggagcaagaaggacaatcgggggaacctgctccagtgcatctgcacaggcaacggccgtggggagtggaagtgtgagaggcacacatctctgcagaccacatctgctggatctggctccttcacagatgtccgaacagccatttaccagccccagcctcacccccagcctgctccatatggtcactgtgtcacagacagcggtgtggtttattccgtggggatgcagtggctgaagacacaaggaaataagcaaatgctttgcacttgcctgggcaatggagtcagctgccaagagacagctgtcacccagacttacggtggcaactccaacggggagccatgcgtcctcccgttcacctacaatggcaggaccttctactcctgcaccacagaagggcgacaggacggacatctctggtgcagcacgacttccaattatgaacaagaccagaaatattctttctgtacagaccatactgttctggttcagactcgaggtggaaattccaatggtgctttgtgccactttcccttcctgtacaacaaccgaaactacaccgactgtacttccgagggcagaagggacaacatgaaatggtgtggaaccacacagaactatgacgctgaccagaagtttggattctgccccatggctgcccatgaggaaatctgtacaaccaacgaaggagtcatgtatcgcatcggagatcagtgggacaaacagcatgatatgggtcacatgatgagatgcacatgtgttgggaacggtcgcggggaatggacatgtgttgcttactcacagctccgagatcagtgcattgttgacgatatcacatacaatgtgaatgacacgttccacaaacgtcacgaggagggacacatgctgaactgcacctgctttggtcagggtcggggccgatggaagtgcgatcccgttgaccaatgccaggattcggaaacccgcaccttttatcaaattggagactcatgggagaagtatgtgcatggggtcaggtaccagtgctactgctatggccgaggcattggagagtggcactgccaacccttacagacctatccaggcacaactggtcctgtccaagtgatcatcactgagacccccagtcagcccaactcgcaccccatccaatggaatgcaccagaaccatctcacatttccaagtacattctcagatggaaacctaaaaattctccaaaccgttggaaggaagccaccattccaggccacttgaactcatacaccatcaagggcttgcggccaggtgtggtatacgagggccagctcatcagcgtccagcactacggccacagagaggtgactcgcttcgacttcaccaccaccagcacaagctcagcagtgaccagcaacaccgtggtgggagagacaacacccttttctcctgttgtggccacttccgaatcagtgacggaaatcacagccagcagctttgtggtctcctgggtctcggcatcggacactgtgtcaggattccgggtggagtatgagctgagcgaggagggcgatgaaccacagtacctggatcttcccagcacagccacttctgtgaacatccctgacctgcttcctggccgaaaatacattgtgaatgtctatcagatatccgaagaaggagagcagagtttgattctgtccacttcgcagacaacagcccctgatgctcctcctgaccctactgtggaccaagttgatgacacctcgattgtcgttcgctggagcagaccccaggcacctatcacaggctatagaatcgtctattccccgtctgtagaaggtagtagcacagaactcaaccttcctgaaactgccaactctgtcactctcagtgacttgcaacctggtgttcagtataacatcacaatctatgctgtggaagaaaatcaagaaagtacccctgtcttcatccagcaagaaaccactggcgtcccacgtccagataaagtgccccctcccaaggacctgcagtttgtggaagtgacggacgtgaaggtcaccatcatgtggacaccccccgagagcccggtgaccggttaccgcgtggacgtgatccccgtcaacctgcctggcgagcatgggcagaggctgcccatcagcaggaacacctttgcagaagtcaccgggctgtcccctggagtcacctaccacttcaaagtcttcgccgtgaaccaggggagggagagcaagcctctgacagcacaacagacaaccaaattggatgctcccaccaacctccagtttatcaacgaaacggactcaaccgtcatggtgacctggacgccacctcgcgccaggatagccgggtaccgattgactgtgggcctgacccggggaggccagcccaagcagtacaacgtggggccctcagcctcgcagtacctactaaggaatctgcagcctggctctgagtatgctgtgaccctcgtggccgtaaaaggcaaccagcagagccccagagccactggcgtcttcaccactctgcagcctgtgggctccattccaccttacaacacagaggtgactgagaccaccattgtgatcacatggacccctgccccaaggatcggctttaagctgggtgtacgaccaagccagggaggggaagcaccacgagaagtgacttcagactcgggaagcatcgttgtgtccggcctgactccaggcgtggaatacgtttacaccatctcagtcctgagagacgggcaagaaagagataccccaattgtgaagaaagtggtgacaccactgtctccaccaacaaacttgcacctggaggcaaaccctgacactggagtgcttaccgtctcctgggagaggagcaccaccccagacattactggctatagaattaccaccacccctacaaatggccagcagggatattctttggaagaagtggtccatgcagatcagagttcctgcacctttgaaaacctaagccctggcctggagtacaatgtcagtgtttatactgtcaaaaatgacaaggaaagtgttcctatctctgataccatcatcccagaggtgccccaactcactgacctaagctttgttgatataaccgattcaagcatcggcctgaggtggaccccgattaactcttccaccattatcgggtaccgcatcacagtagttgcggcaggagaaggtatccctatttttgaagattttgcggactcctcagtaggatactacacagttacagggctggagcctggcattgactatgacatcagcgttatcactctcattaatggcggagagagtgcccctactacactgacacagcaaacggctgtccctcctcccactgacctgcgatttaccaatgttggtcctgatacgatacgtgtcacctgggctccacctccatccattgaactgaccaacttcctggtgcgctactcccctgtgaaaaatgaggaggatgtggcagagctgtccatttctccttcagacaacgcagtggtcctcacaaatctgctgcctggcacagagtatttagtcagcgtctccagtgtctatgagcagcatgaaagcatacctctcagaggaagacagaaaacaggtcttgattccccaactggcattgacttctctgatatcaccgccaactctttcactgtgtactggattgctcctcgcgccaccatcactggctacaagatccgccatcaccctgagcacatgggtggaagacctcgggaagatcgcgtgcccccctctcggaattccatcaccctcaccaacctcattccaggcgtggaatatgtggtcagcatcgtcgctgttaatggcagagaggaaagccctcccttggtcggccaacaatcaacagtttctgatgttccaagggacctgcaagtcattgccacaacccccactagcctgttgatcagctgggatgctcctgctgtcacagtgagatattacaggatcacgtatggagaaacaggaggaaatagccctgtccaggagttcactgtgcctgggagcaagtctacagctaccatcagtggccttaagcctggagtagactacaccatcaccgtctatgctgtcactggccgtggggacagcccagcaagcagcaagcccgtttccattgattatcgaacagaaattgataaaccatcccagatgcaagtgactgatgtccaggacaacagcatcagtgtcaggtggctgccttcaagttcccatgttactggttacagagtgaccactactcctaaaaatggctcaggaccatcaaaaacgaaaactgttggtccagatcaaacagaaatgacaatagaaggcttgcagcccacagtggagtatgtggttagtgtctacgctcagaatcaaaacggagagagtcagcctctggttcagacagcggtaaccaacattgatcgccccaaaggactggcattcactgatgtggatgtcgattccatcaaaattgcttgggaaagcccacaggggcaagtttccaggtacagggtgacctactcgagccctgaggatggaatccatgagctattccctgcacctgatggtgaagaagacactgcagagctgcaaggcctcaggccgggttctgagtacacagtcagtgtggttgccttgcacgatgatatggagagccagcccctgattggaacccagtccacagccattcctgcaccaaccaacctgaagttcactcaggtaacacccacaagcctgactgcccagtggacagcccccaacgttcagctcactgggtatcgagtgcgggtgacccccaaggagaagaccgggccaatgaaggaaatcaaccttgctcctgatagctcctctgtggtcgtatcaggactcatggtggccaccaagtatgaagtgagcatctatgctcttaaggacactttgacaagcagaccagctcagggagttgtcacgaccctggagaatgtcagtcctccaagaagggcccgggtgacagatgctactgagaccaccatcaccattagctggaggaccaagactgagacgatcaccggcttccaagttgatgccgtcccagccaatggccagactccaatccagagaaccatcaagccagatgtcaggagctacaccatcacaggtttacaacccggcactgactacaagatctacttgtacaccctgaatgacaatgcccggagctcccctgtggtcatcgatgcctccactgccatcgatgcaccatccaacttgcgtttcctggccaccacacccaattccttgttggtatcatggcagccaccccgtgccaagattactggttacatcatcaagtatgagaagcctgggtcccctcccagagaagtggtccctcggccccgccctggtgtcacagaagctactattactggtctggaaccagcaaccgagtacacaatccaggtcattgccctcaagaacaatcagaagagtgagcctctgatcgggaggaaaaggacagatgagcttccccaactggtaacccttccacaccccaatcttcatggaccagagatcttggatgttccctccacagttcaaaagacccctttcgtcaccaaacccgggtatgacactggaaacggtattcagcttcctggcacttctggtcagcagcccagtcttgggcaacaaatgatctttgaggagcatggttttaggagaaccacaccgcccacaacggccacccccgtaaggcataggccaggaccgtatacgccgaatgtaaatgaggagatccaagttggtcatgtccccaggggagacgtagaccatcacctctaccctcacgttctgggactcaatccaaatgcttctacaggacaagaagctctctctcagacaaccatctcatggaccccattccaggaaagctctgaatatatcatttcatgtcatcccgtgggcattgatgaagaacccttgcagttccgagttcctggaacttctgctagtgccaccttgacgggtctcaccagaggtgccacctacaacatcatagtggaggcactaaaagaccagaagaggcacaagattcgggaggaggtggttactgtgggcaattctgttgaccaaggcctaagccaacccacggatgactcgtgcttcgacccctacacggtttcccattatgccatcggagaagagtgggagcgattatctgaatctggctttaagctctcgtgccagtgcttaggctttggcagtggtcatttcagatgtgattcatctaaatggtgccatgacaatggtgtgaattacaagattggagagaagtgggatcgtcagggagagaatggccagatgatgagctgcacatgtctcggaaatggaaaaggagaattcaagtgtgatccccatgaagcgacgtgttatgatgatgggaagacataccatgtgggagaacagtggcagaaggaatatctcggtgccatttgctcctgcacgtgctttggaggccagcggggctggcgctgtgacaactgccgcagaccaggggctgaactcggtcccgaaggctccaccgggcactcctacaaccagtattcacagagataccatcagagaacaaacaccaatgtcaactgcccaattgagtgcttcatgcctttagatgtacaggctgacatagaagattcccgagagtaaaatttccaagctggagaaacaagcacggatctctgccaaggtccatccaaactggagtgatgttagcagaccccatcccagtttgtttctttcttaagccctttgctctggagtaatttcttcagcttcagctcaactcacagcttctccaagcatcaccctgggagtgttttgagacttttctcataaatggcagtacatggcctgctctccaaagtgttcagtaccgctcaatattttaaatgaaatgattctaacttgtgatctgaattgggatcagtagggttgcacatgtaccaaccaagatgcaaaatgtcttgaaatgatattaccaaaaattttaagtaggaaagttacccaaacacttctgcttccacttaactgtctggcccgcaatattgtaggaacagcatatccttgttactgtgatatttaaaatatccacagtactcactttttccagatgactttggtaattgcctagaaatatctttctcttacctgttatttatcaatttttcccagtatttttatatggaatcaaattgtattgaagacagttagtaggcagttgataagaggaatttggtataattatggttggtgattattttttatactgtacgtgccaaagctttactactgtggaaagacaactgtttagtaaaagatttacattccacaattttaat

SEQ ID NO: 278 - protein, 2478 aa, Sus scrofa
MLGGPGPGLLLLAVLSLGTTVPSTGASKSKRQAQQIVQPQSPLVDSQRKPGCYDNGKHYQINQQWERTYLGSALVCTCYGGSRGFNCESKPEPEETCFDKYTGNTYRVGDTYERPKDSMIWDCTCIGAGRGRISCTIANRCHEGGQSYKIGDTWRRPHETGGYMLECVCLGNGKGEWTCKPIAEKCFDHAAGGTSYVVGETWEKPYQGWMMVDCTCLGEGSGRITCTSRNRCNDQDTRTSYRIGDTWSKKDNRGNLLQCICTGNGRGEWKCERHTSLQTTSAGSGSFTDVRTAIYQPQPHPQPAPYGHCVTDSGVVYSVGMQWLKTQGNKQMLCTCLGNGVSCQETAVTQTYGGNSNGEPCVLPFTYNGRTFYSCTTEGRQDGHLWCSTTSNYEQDQKYSFCTDHTVLVQTRGGNSNGALCHFPFLYNNRNYTDCTSEGRRDNMKWCGTTQNYDADQKFGFCPMAAHEEICTTNEGVMYRIGDQWDKQHDMGHMMRCTCVGNGRGEWTCVAYSQLRDQCIVDDITYNVNDTFHKRHEEGHMLNCTCFGQGRGRWKCDPVDQCQDSETRTFYQIGDSWEKYVHGVRYQCYCYGRGIGEWHCQPLQTYPGTTGPVQVIITETPSQPNSHPIQWNAPEPSHISKYILRWKPKNSPNRWKEATIPGHLNSYTIKGLRPGVVYEGQLISVQHYGHREVTRFDFTTTSTSSAVTSNTVVGETTPFSPVVATSESVTEITASSFVVSWVSASDTVSGFRVEYELSEEGDEPQYLDLPSTATSVNIPDLLPGRKYIVNVYQISEEGEQSLILSTSQTTAPDAPPDPTVDQVDDTSIVVRWSRPQAPITGYRIVYSPSVEGSSTELNLPETANSVTLSDLQPGVQYNITIYAVEENQESTPVFIQQETTGVPRPDKVPPPKDLQFVEVTDVKVTIMWTPPESPVTGYRVDVIPVNLPGEHGQRLPISRNTFAEVTGLSPGVTYHFKVFAVNQGRESKPLTAQQTTKLDAPTNLQFINETDSTVMVTWTPPRARIAGYRLTVGLTRGGQPKQYNVGPSASQYLLRNLQPGSEYAVTLVAVKGNQQSPRATGVFTTLQPVGSIPPYNTEVTETTIVITWTPAPRIGFKLGVRPSQGGEAPREVTSDSGSIVVSGLTPGVEYVYTISVLRDGQERDTPIVKKVVTPLSPPTNLHLEANPDTGVLTVSWERSTTPDITGYRITTTPTNGQQGYSLEEVVHADQSSCTFENLSPGLEYNVSVYTVKNDKESVPISDTIIPEVPQLTDLSFVDITDSSIGLRWTPINSSTIIGYRITVVAAGEGIPIFEDFADSSVGYYTVTGLEPGIDYDISVITLINGGESAPTTLTQQTAVPPPTDLRFTNVGPDTIRVTWAPPPSIELTNFLVRYSPVKNEEDVAELSISPSDNAVVLTNLLPGTEYLVSVSSVYEQHESIPLRGRQKTGLDSPTGIDFSDITANSFTVYWIAPRATITGYKIRHHPEHMGGRPREDRVPPSRNSITLTNLIPGVEYVVSIVAVNGREESPPLVGQQSTVSDVPRDLQVIATTPTSLLISWDAPAVTVRYYRITYGETGGNSPVQEFTVPGSKSTATISGLKPGVDYTITVYAVTGRGDSPASSKPVSIDYRTEIDKPSQMQVTDVQDNSISVRWLPSSSHVTGYRVTTTPKNGSGPSKTKTVGPDQTEMTIEGLQPTVEYVVSVYAQNQNGESQPLVQTAVTNIDRPKGLAFTDVDVDSIKIAWESPQGQVSRYRVTYSSPEDGIHELFPAPDGEEDTAELQGLRPGSEYTVSVVALHDDMESQPLIGTQSTAIPAPTNLKFTQVTPTSLTAQWTAPNVQLTGYRVRVTPKEKTGPMKEINLAPDSSSVVVSGLMVATKYEVSIYALKDTLTSRPAQGVVTTLENVSPPRRARVTDATETTITISWRTKTETITGFQVDAVPANGQTPIQRTIKPDVRSYTITGLQPGTDYKIYLYTLNDNARSSPVVIDASTAIDAPSNLRFLATTPNSLLVSWQPPRAKITGYIIKYEKPGSPPREVVPRPRPGVTEATITGLEPATEYTIQVIALKNNQKSEPLIGRKRTDELPQLVTLPHPNLHGPEILDVPSTVQKTPFVTKPGYDTGNGIQLPGTSGQQPSLGQQMIFEEHGFRRTTPPTTATPVRHRPGPYTPNVNEEIQVGHVPRGDVDHHLYPHVLGLNPNASTGQEALSQTTISWTPFQESSEYIISCHPVGIDEEPLQFRVPGTSASATLTGLTRGATYNIIVEALKDQKRHKIREEVVTVGNSVDQGLSQPTDDSCFDPYTVSHYAIGEEWERLSESGFKLSCQCLGFGSGHFRCDSSKWCHDNGVNYKIGEKWDRQGENGQMMSCTCLGNGKGEFKCDPHEATCYDDGKTYHVGEQWQKEYLGAICSCTCFGGQRGWRCDNCRRPGAELGPEGSTGHSYNQYSQRYHQRTNTNVNCPIECFMPLDVQADIEDSRE

SEQ ID NO: 279 - DNA, 7481 bp, Sus scrofa
tgcagggggggaggagagggagccctaggcgcgagcgggagagaggggacctgcagccacaacttctttcttcctctccttcccctctgtccctctacccttccccttccccatcatccagcccttaccttcttggcggcgtcggcccgtagcgggcactggaagggactcctctggcaggttgcgaaaaagaagtcaaacttggtggaaagttgtctcctggttagagcgtctatatccccgcaccttctcaagatgctcgggggtccaggacccgggcttctgctgctggccgtcctgtccctggggacaacggtgccctccactggagcgtcgaagagcaagaggcaggctcagcagatcgttcagccccaatccccgttggttgacagccaacgcaagcctggttgttacgacaatggaaaacactatcagataaaccaacaatgggagcgcacttacctgggcagtgccttggtttgtacctgttatggagggagccggggcttcaactgtgagagcaagcctgagcctgaagagacctgctttgacaagtacactgggaacacttaccgggtgggcgacacttatgagcgccctaaagactccatgatctgggactgtacctgcattggagctgggcgaggcagaataagttgcaccattgcaaaccgctgccatgaagggggtcagtcctacaagattggtgacacttggaggagaccgcatgagactggtggttacatgttagagtgtgtgtgtcttggtaatgggaaaggagaatggacctgcaagcccatagctgagaaatgttttgatcacgcggctggagggacttcctacgttgtcggggagacctgggaaaagccttatcagggctggatgatggtggattgtacttgtctgggagaaggcagtggacgtatcacctgcacctctagaaacagatgcaacgatcaggacaccagaacatcctatagaattggggatacctggagcaagaaggacaatcgggggaacctgctccagtgcatctgcacaggcaacggccgtggggagtggaagtgtgagaggcacacatctctgcagaccacatctgctggatctggctccttcacagatgtccgaacagccatttaccagccccagcctcacccccagcctgctccatatggtcactgtgtcacagacagcggtgtggtttattccgtggggatgcagtggctgaagacacaaggaaataagcaaatgctttgcacttgcctgggcaatggagtcagctgccaagagacagctgtcacccagacttacggtggcaactccaacggggagccatgcgtcctcccgttcacctacaatggcaggaccttctactcctgcaccacagaagggcgacaggacggacatctctggtgcagcacgacttccaattatgaacaagaccagaaatattctttctgtacagaccatactgttctggttcagactcgaggtggaaattccaatggtgctttgtgccactttcccttcctgtacaacaaccgaaactacaccgactgtacttccgagggcagaagggacaacatgaaatggtgtggaaccacacagaactatgacgctgaccagaagtttggattctgccccatggctgcccatgaggaaatctgtacaaccaacgaaggagtcatgtatcgcatcggagatcagtgggacaaacagcatgatatgggtcacatgatgagatgcacatgtgttgggaacggtcgcggggaatggacatgtgttgcttactcacagctccgagatcagtgcattgttgacgatatcacatacaatgtgaatgacacgttccacaaacgtcacgaggagggacacatgctgaactgcacctgctttggtcagggtcggggccgatggaagtgcgatcccgttgaccaatgccaggattcggaaacccgcaccttttatcaaattggagactcatgggagaagtatgtgcatggggtcaggtaccagtgctactgctatggccgaggcattggagagtggcactgccaacccttacagacctatccaggcacaactggtcctgtccaagtgatcatcactgagacccccagtcagcccaactcgcaccccatccaatggaatgcaccagaaccatctcacatttccaagtacattctcagatggaaacctaaaaattctccaaaccgttggaaggaagccaccattccaggccacttgaactcatacaccatcaagggcttgcggccaggtgtggtatacgagggccagctcatcagcgtccagcactacggccacagagaggtgactcgcttcgacttcaccaccaccagcacaagctcagcagtgaccagcaacaccgtggtgggagagacaacacccttttctcctgttgtggccacttccgaatcagtgacggaaatcacagccagcagctttgtggtctcctgggtctcggcatcggacactgtgtcaggattccgggtggagtatgagctgagcgaggagggcgatgaaccacagtacctggatcttcccagcacagccacttctgtgaacatccctgacctgcttcctggccgaaaatacattgtgaatgtctatcagatatccgaagaaggagagcagagtttgattctgtccacttcgcagacaacagcccctgatgctcctcctgaccctactgtggaccaagttgatgacacctcgattgtcgttcgctggagcagaccccaggcacctatcacaggctatagaatcgtctattccccgtctgtagaaggtagtagcacagaactcaaccttcctgaaactgccaactctgtcactctcagtgacttgcaacctggtgttcagtataacatcacaatctatgctgtggaagaaaatcaagaaagtacccctgtcttcatccagcaagaaaccactggcgtcccacgtccagataaagtgccccctcccaaggacctgcagtttgtggaagtgacggacgtgaaggtcaccatcatgtggacaccccccgagagcccggtgaccggttaccgcgtggacgtgatccccgtcaacctgcctggcgagcatgggcagaggctgcccatcagcaggaacacctttgcagaagtcaccgggctgtcccctggagtcacctaccacttcaaagtcttcgccgtgaaccaggggagggagagcaagcctctgacagcacaacagacaaccaaattggatgctcccaccaacctccagtttatcaacgaaacggactcaaccgtcatggtgacctggacgccacctcgcgccaggatagccgggtaccgattgactgtgggcctgacccggggaggccagcccaagcagtacaacgtggggccctcagcctcgcagtacctactaaggaatctgcagcctggctctgagtatgctgtgaccctcgtggccgtaaaaggcaaccagcagagccccagagccactggcgtcttcaccactctgcagcctgtgggctccattccaccttacaacacagaggtgactgagaccaccattgtgatcacatggacccctgccccaaggatcggctttaagctgggtgtacgaccaagccagggaggggaagcaccacgagaagtgacttcagactcgggaagcatcgttgtgtccggcctgactccaggcgtggaatacgtttacaccatctcagtcctgagagacgggcaagaaagagataccccaattgtgaagaaagtggtgacaccactgtctccaccaacaaacttgcacctggaggcaaaccctgacactggagtgcttaccgtctcctgggagaggagcaccaccccagacattactggctatagaattaccaccacccctacaaatggccagcagggatattctttggaagaagtggtccatgcagatcagagttcctgcacctttgaaaacctaagccctggcctggagtacaatgtcagtgtttatactgtcaaaaatgacaaggaaagtgttcctatctctgataccatcatcccagctgtccctcctcccactgacctgcgatttaccaatgttggtcctgatacgatacgtgtcacctgggctccacctccatccattgaactgaccaacttcctggtgcgctactcccctgtgaaaaatgaggaggatgtggcagagctgtccatttctccttcagacaacgcagtggtcctcacaaatctgctgcctggcacagagtatttagtcagcgtctccagtgtctatgagcagcatgaaagcatacctctcagaggaagacagaaaacaggtcttgattccccaactggcattgacttctctgatatcaccgccaactctttcactgtgtactggattgctcctcgcgccaccatcactggctacaagatccgccatcaccctgagcacatgggtggaagacctcgggaagatcgcgtgcccccctctcggaattccatcaccctcaccaacctcattccaggcgtggaatatgtggtcagcatcgtcgctgttaatggcagagaggaaagccctcccttggtcggccaacaatcaacagtttctgatgttccaagggacctgcaagtcattgccacaacccccactagcctgttgatcagctgggatgctcctgctgtcacagtgagatattacaggatcacgtatggagaaacaggaggaaatagccctgtccaggagttcactgtgcctgggagcaagtctacagctaccatcagtggccttaagcctggagtagactacaccatcaccgtctatgctgtcactggccgtggggacagcccagcaagcagcaagcccgtttccattgattatcgaacagaaattgataaaccatcccagatgcaagtgactgatgtccaggacaacagcatcagtgtcaggtggctgccttcaagttcccatgttactggttacagagtgaccactactcctaaaaatggctcaggaccatcaaaaacgaaaactgttggtccagatcaaacagaaatgacaatagaaggcttgcagcccacagtggagtatgtggttagtgtctacgctcagaatcaaaacggagagagtcagcctctggttcagacagcggtaaccaccattcctgcaccaaccaacctgaagttcactcaggtaacacccacaagcctgactgcccagtggacagcccccaacgttcagctcactgggtatcgagtgcgggtgacccccaaggagaagaccgggccaatgaaggaaatcaaccttgctcctgatagctcctctgtggtcgtatcaggactcatggtggccaccaagtatgaagtgagcatctatgctcttaaggacactttgacaagcagaccagctcagggagttgtcacgaccctggagaatgtcagtcctccaagaagggcccgggtgacagatgctactgagaccaccatcaccattagctggaggaccaagactgagacgatcaccggcttccaagttgatgccgtcccagccaatggccagactccaatccagagaaccatcaagccagatgtcaggagctacaccatcacaggtttacaacccggcactgactacaagatctacttgtacaccctgaatgacaatgcccggagctcccctgtggtcatcgatgcctccactgccatcgatgcaccatccaacttgcgtttcctggccaccacacccaattccttgttggtatcatggcagccaccccgtgccaagattactggttacatcatcaagtatgagaagcctgggtcccctcccagagaagtggtccctcggccccgccctggtgtcacagaagctactattactggtctggaaccagcaaccgagtacacaatccaggtcattgccctcaagaacaatcagaagagtgagcctctgatcgggaggaaaaggacaggacaagaagctctctctcagacaaccatctcatggaccccattccaggaaagctctgaatatatcatttcatgtcatcccgtgggcattgatgaagaacccttgcagttccgagttcctggaacttctgctagtgccaccttgacgggtctcaccagaggtgccacctacaacatcatagtggaggcactaaaagaccagaagaggcacaagattcgggaggaggtggttactgtgggcaattctgttgaccaaggcctaagccaacccacggatgactcgtgcttcgacccctacacggtttcccattatgccatcggagaagagtgggagcgattatctgaatctggctttaagctctcgtgccagtgcttaggctttggcagtggtcatttcagatgtgattcatctaaatggtgccatgacaatggtgtgaattacaagattggagagaagtgggatcgtcagggagagaatggccagatgatgagctgcacatgtctcggaaatggaaaaggagaattcaagtgtgatccccatgaagcgacgtgttatgatgatgggaagacataccatgtgggagaacagtggcagaaggaatatctcggtgccatttgctcctgcacgtgctttggaggccagcggggctggcgctgtgacaactgccgcagaccaggggctgaactcggtcccgaaggctccaccgggcactcctacaaccagtattcacagagataccatcagagaacaaacaccaatgtcaactgcccaattgagtgcttcatgcctttagatgtacaggctgacatagaagattcccgagagtaaaatttccaagctggagaaacaagcacggatctctgccaaggtccatccaaactggagtgatgttagcagaccccatcccagtttgtttctttcttaagccctttgctctggagtaatttcttcagcttcagctcaactcacagcttctccaagcatcaccctgggagtgttttgagacttttctcataaatggcagtacatggcctgctctccaaagtgttcagtaccgctcaatattttaaatgaaatgattctaacttgtgatctgaattgggatcagtagggttgcacatgtaccaaccaagatgcaaaatgtcttgaaatgatattaccaaaaattttaagtaggaaagttacccaaacacttctgcttccacttaactgtctggcccgcaatattgtaggaacagcatatccttgttactgtgatatttaaaatatccacagtactcactttttccagatgactttggtaattgcctagaaatatctttctcttacctgttatttatcaatttttcccagtatttttatatggaatcaaattgtattgaagacagttagtaggcagttgataagaggaatttggtataattatggttggtgattattttttatactgtacgtgccaaagctttactactgtggaaagacaactgtttagtaaaagatttacattccacaattttaat

SEQ ID NO: 280 - protein, 2177 aa, Sus scrofa
MLGGPGPGLLLLAVLSLGTTVPSTGASKSKRQAQQIVQPQSPLVDSQRKPGCYDNGKHYQINQQWERTYLGSALVCTCYGGSRGFNCESKPEPEETCFDKYTGNTYRVGDTYERPKDSMIWDCTCIGAGRGRISCTIANRCHEGGQSYKIGDTWRRPHETGGYMLECVCLGNGKGEWTCKPIAEKCFDHAAGGTSYVVGETWEKPYQGWMMVDCTCLGEGSGRITCTSRNRCNDQDTRTSYRIGDTWSKKDNRGNLLQCICTGNGRGEWKCERHTSLQTTSAGSGSFTDVRTAIYQPQPHPQPAPYGHCVTDSGVVYSVGMQWLKTQGNKQMLCTCLGNGVSCQETAVTQTYGGNSNGEPCVLPFTYNGRTFYSCTTEGRQDGHLWCSTTSNYEQDQKYSFCTDHTVLVQTRGGNSNGALCHFPFLYNNRNYTDCTSEGRRDNMKWCGTTQNYDADQKFGFCPMAAHEEICTTNEGVMYRIGDQWDKQHDMGHMMRCTCVGNGRGEWTCVAYSQLRDQCIVDDITYNVNDTFHKRHEEGHMLNCTCFGQGRGRWKCDPVDQCQDSETRTFYQIGDSWEKYVHGVRYQCYCYGRGIGEWHCQPLQTYPGTTGPVQVIITETPSQPNSHPIQWNAPEPSHISKYILRWKPKNSPNRWKEATIPGHLNSYTIKGLRPGVVYEGQLISVQHYGHREVTRFDFTTTSTSSAVTSNTVVGETTPFSPVVATSESVTEITASSFVVSWVSASDTVSGFRVEYELSEEGDEPQYLDLPSTATSVNIPDLLPGRKYIVNVYQISEEGEQSLILSTSQTTAPDAPPDPTVDQVDDTSIVVRWSRPQAPITGYRIVYSPSVEGSSTELNLPETANSVTLSDLQPGVQYNITIYAVEENQESTPVFIQQETTGVPRPDKVPPPKDLQFVEVTDVKVTIMWTPPESPVTGYRVDVIPVNLPGEHGQRLPISRNTFAEVTGLSPGVTYHFKVFAVNQGRESKPLTAQQTTKLDAPTNLQFINETDSTVMVTWTPPRARIAGYRLTVGLTRGGQPKQYNVGPSASQYLLRNLQPGSEYAVTLVAVKGNQQSPRATGVFTTLQPVGSIPPYNTEVTETTIVITWTPAPRIGFKLGVRPSQGGEAPREVTSDSGSIVVSGLTPGVEYVYTISVLRDGQERDTPIVKKVVTPLSPPTNLHLEANPDTGVLTVSWERSTTPDITGYRITTTPTNGQQGYSLEEVVHADQSSCTFENLSPGLEYNVSVYTVKNDKESVPISDTIIPAVPPPTDLRFTNVGPDTIRVTWAPPPSIELTNFLVRYSPVKNEEDVAELSISPSDNAVVLTNLLPGTEYLVSVSSVYEQHESIPLRGRQKTGLDSPTGIDFSDITANSFTVYWIAPRATITGYKIRHHPEHMGGRPREDRVPPSRNSITLTNLIPGVEYVVSIVAVNGREESPPLVGQQSTVSDVPRDLQVIATTPTSLLISWDAPAVTVRYYRITYGETGGNSPVQEFTVPGSKSTATISGLKPGVDYTITVYAVTGRGDSPASSKPVSIDYRTEIDKPSQMQVTDVQDNSISVRWLPSSSHVTGYRVTTTPKNGSGPSKTKTVGPDQTEMTIEGLQPTVEYVVSVYAQNQNGESQPLVQTAVTTIPAPTNLKFTQVTPTSLTAQWTAPNVQLTGYRVRVTPKEKTGPMKEINLAPDSSSVVVSGLMVATKYEVSIYALKDTLTSRPAQGVVTTLENVSPPRRARVTDATETTITISWRTKTETITGFQVDAVPANGQTPIQRTIKPDVRSYTITGLQPGTDYKIYLYTLNDNARSSPVVIDASTAIDAPSNLRFLATTPNSLLVSWQPPRAKITGYIIKYEKPGSPPREVVPRPRPGVTEATITGLEPATEYTIQVIALKNNQKSEPLIGRKRTGQEALSQTTISWTPFQESSEYIISCHPVGIDEEPLQFRVPGTSASATLTGLTRGATYNIIVEALKDQKRHKIREEVVTVGNSVDQGLSQPTDDSCFDPYTVSHYAIGEEWERLSESGFKLSCQCLGFGSGHFRCDSSKWCHDNGVNYKIGEKWDRQGENGQMMSCTCLGNGKGEFKCDPHEATCYDDGKTYHVGEQWQKEYLGAICSCTCFGGQRGWRCDNCRRPGAELGPEGSTGHSYNQYSQRYHQRTNTNVNCPIECFMPLDVQADIEDSRE

1. A method for evaluating the quality of a mammalian oocyte comprising:
(a) determining the level of expression of at least one marker gene of a set of marker genes comprising ACPP, AQP11, CCDC126, CLU, CYP11A1, CYP19A1, EGR3, FN1, FOSL2, GMNN, HRAS, HSD3B2, HSD17B1, HSD11B2, HSDL1, IGF1, IGFBP4, IGFBP5, IRS1, KCNK3, KLF6, NEK6, SMAD7 and STC1 in a sample derived from a cumulus cell or granulosa cell associated with the oocyte, after maturation of the oocyte;
(b) comparing the expression level of said at least one marker gene in the test sample with the expression level in a control, wherein detecting differential expression of the maker gene between the sample and the control is indicative of the quality of the oocyte.

2. The method according to claim 1, wherein the control is a sample derived from a cumulus cell or a granulosa cell associated with a mammalian oocyte of known quality.

3. The method according to claim 2 wherein the control is a sample derived from a cumulus cell or a granulosa cell associated with an in vitro matured mammalian oocyte.

4. The method according to claim 2 wherein the control sample is derived from a cumulus cell or a granulosa cell associated with an in vivo mammalian matured oocyte.

5. The method according to claim 2 wherein the level of expression of at least three of said marker genes is determined.

6. The method according to claim 5 wherein the marker genes comprise NEK6, AQP11 and IGF1.

7. The method according to claim 6 wherein the probability of the oocyte having a high quality (P) is given by the equation:
P=e^{5.608+0.645x+0.100y-2.17z}/1+e^{.}e^{5.608+0.645x+0.100y-2.17z}
wherein:
x is the expression level of NEK6 relative to the control;
y is the expression level of AQP 11 relative to the control; and
z is the expression level of IGF1 relative to the control.

8. The method according to claim 5 wherein the level of expression of at least ten of said marker genes is determined.

9. The method according to claim 2 wherein marker gene expression level is determined by determining the level of mRNA produced from said marker gene.

10. The method according to claim 9 wherein the level of mRNA is determined by reverse transcription polymerase chain reaction.

11. The method according to claim 9 wherein the mammalian oocyte is an oocyte of a domesticated mammal.

12. The method according to claim 11 wherein the domesticated mammal is a bovine, pig or sheep.

13. The method according to claim 12 wherein the domesticated mammal is a bovine.

14. The method according to claim 13 wherein the level of at least one of the following mRNAs is determined:
the NEK6 mRNA having Genbank Accession Number NM_{—}001098988.1 (SEQ ID NO: 181);
the AQP11 mRNA having Genbank Accession Number NM_{—}001110069.1 (SEQ ID NO: 183);
the CCDC 126 mRNA having Genbank Accession Number NM_{—}001082472.2 (SEQ ID NO: 185);
the KLF6 mRNA having Genbank Accession Number NM_{—}001035271.2 (SEQ ID NO: 187);
the ACPP mRNA having Genbank Accession Number NM_{—}001098866.1 (SEQ ID NO: 189);
the IGFBP4 mRNA having Genbank Accession Number NM_{—}174557.3 (SEQ ID NO: 191);
the IGF1 mRNA having Genbank Accession Number NM_{—}001077828.1 (SEQ ID NO: 193);
the IRS1 mRNA having Genbank Accession Number XM_{—}581382.3 (SEQ ID NO: 195);
the IRS1 mRNA having Genbank Accession Number XM_{—}002685642.1 (SEQ ID NO: 197);
the FOSL2 mRNA having Genbank Accession Number NM_{—}001192950.1(SEQ ID NO: 199);
the FOSL2 mRNA having Genbank Accession Number XM_{—}002691451.1(SEQ ID NO: 201);
the HRAS mRNA having Genbank Accession Number XM_{—}590626.2 (SEQ ID NO: 203);
the HRAS mRNA having Genbank Accession Number XM_{—}874655.1 (SEQ ID NO: 205);
the HRAS mRNA having Genbank Accession Number XM_{—}874570.1 (SEQ ID NO: 207);
the CLU mRNA having Genbank Accession Number NM_{—}173902.2 (SEQ ID NO: 209);
the HSD17B1 mRNA having Genbank Accession Number XM_{—}001253407.1 (SEQ ID NO: 211);
the HSD17B1 mRNA having Genbank Accession Number NM_{—}001102365.1 (SEQ ID NO: 213);
the HSDL1 mRNA having Genbank Accession Number NM_{—}001098871.1 (SEQ ID NO: 215);
the HSD11B2 mRNA having Genbank Accession Number NM_{—}174642.1 (SEQ ID NO: 217);
the STC1 mRNA having Genbank Accession Number NM_{—}176669.3 (SEQ ID NO: 219);
the CYP11A1 mRNA having Genbank Accession Number NM_{—}176644.2 (SEQ ID NO: 221);
the GMNN mRNA having Genbank Accession Number NM_{—}001025337.1 (SEQ ID NO: 223);
the CYP19A1 mRNA having Genbank Accession Number NM_{—}174305.1 (SEQ ID NO: 225);
the IGFBP5 mRNA having Genbank Accession Number NM_{—}001105327.1 (SEQ ID NO: 227);
the KCNK3 mRNA having Genbank Accession Number XM_{—}597401.5 (SEQ ID NO: 229);
the KCNK3 mRNA having Genbank Accession Number XM_{—}002691458.1 (SEQ ID NO: 231);
the SMAD7 mRNA having Genbank Accession Number NM_{—}001192865.1 (SEQ ID NO: 233);
the SMAD7 mRNA having Genbank Accession Number XM_{—}002697763.1 (SEQ ID NO: 235);
the SMAD7 mRNA having Genbank Accession Number XM_{—}616030.3 (SEQ ID NO: 237);
the EGR3 mRNA having Genbank Accession Number XM_{—}604596.5 (SEQ ID NO: 239);
the EGR3 mRNA having Genbank Accession Number XM_{—}002689773.1 (SEQ ID NO: 241); and
the FN1 mRNA having Genbank Accession Number NM_{—}001163778.1 (SEQ ID NO: 243).

15. The method according to claim 12 wherein the domesticated mammal is a pig.

16. The method according to claim 15 wherein the level of at least one of the following mRNAs is determined:
the KLF6 mRNA having Genbank Accession Number NM_{—}001134353.2 (SEQ ID NO: 245);
the IGFBP4 mRNA having Genbank Accession Number NM_{—}001123129.1 (SEQ ID NO: 247);
the IGF1 mRNA having Genbank Accession Number NM_{—}214256.1 (SEQ ID NO: 249);
the HRAS mRNA having Genbank Accession Number NM_{—}001044537.1 (SEQ ID NO: 251);
the CLU mRNA having Genbank Accession Number NM_{—}213971.1 (SEQ ID NO: 253);
the HSD17B1 mRNA having Genbank Accession Number NM_{—}001128472.1 (SEQ ID NO: 255);
the HSD11B2 mRNA having Genbank Accession Number NM_{—}213913.1 (SEQ ID NO: 257);
the STC1 mRNA having Genbank Accession Number NM_{—}001103212.1 (SEQ ID NO: 259);
the CYP11A1 mRNA having Genbank Accession Number NM_{—}214427.1 (SEQ ID NO: 261);
the CYP19A1 mRNA having Genbank Accession Number NM_{—}214429.1 (SEQ ID NO: 263);
the IGFBP5 mRNA having Genbank Accession Number NM_{—}214099.1 (SEQ ID NO: 265);
the SMAD7 mRNA having Genbank Accession Number XM_{—}001927582.1 (SEQ ID NO: 267);
the ACPP mRNA having Genbank Accession Number XM_{—}003132419.1 (SEQ ID NO: 269);
the IRS 1 mRNA having Genbank Accession Number EU681268.1 (SEQ ID NO: 271);
the EGR3 mRNA having Genbank Accession Number XM_{—}003132807.1 (SEQ ID NO: 273);
the FN1 mRNA having Genbank Accession Number XM_{—}003133641.1 (SEQ ID NO: 275);
the FN1 mRNA having Genbank Accession Number XM_{—}003133642.1 (SEQ ID NO: 277); and
the FN1 mRNA having Genbank Accession Number XM_{—}003133643.1 (SEQ ID NO: 279).

17. The method according to claim 9 wherein the mammalian oocyte is an oocyte of a human being.

18. The method according to claim 17 wherein the level of at least one of the following mRNAs is determined:
the NEK6 mRNA having Genbank Accession Number NM_{—}001145001.2 (SEQ ID NO: 73);
the NEK6 mRNA having Genbank Accession Number NM_{—}001166167.1 (SEQ ID NO: 75);
the NEK6 mRNA having Genbank Accession Number NM_{—}001166168.1 (SEQ ID NO: 77);
the NEK6 mRNA having Genbank Accession Number NM_{—}001166169.1 (SEQ ID NO: 79);
the NEK6 mRNA having Genbank Accession Number NM_{—}001166170.1 (SEQ ID NO: 81);
the NEK6 mRNA having Genbank Accession Number NM_{—}001166171.1 (SEQ ID NO: 83);
the NEK6 mRNA having Genbank Accession Number NM_{—}014397.5 (SEQ ID NO: 85);
the AQP11 mRNA having Genbank Accession Number NM_{—}173039.2 (SEQ ID NO: 87);
the CCDC126 mRNA having Genbank Accession Number NM_{—}138771.3 (SEQ ID NO: 89);
the KLF6 mRNA having Genbank Accession Number NM_{—}001160124.1 (SEQ ID NO: 91);
the KLF6 mRNA having Genbank Accession Number NM_{—}001160125.1 (SEQ ID NO: 93);
the KLF6 mRNA having Genbank Accession Number NM_{—}001300.5 (SEQ ID NO: 95);
the ACPP mRNA having Genbank Accession Number NM_{—}001134194.1 (SEQ ID NO: 99);
the ACPP mRNA having Genbank Accession Number NM_{—}001099.4 (SEQ ID NO: 97);
the IGFBP4 mRNA having Genbank Accession Number NM_{—}001552.2 (SEQ ID NO: 101);
the IGF1 mRNA having Genbank Accession Number NM_{—}000618.3 (SEQ ID NO: 103);
the IGF1 mRNA having Genbank Accession Number NM_{—}001111283.1 (SEQ ID NO: 105);
the IGF1 mRNA having Genbank Accession Number NM_{—}001111284.1 (SEQ ID NO: 107);
the IGF1 mRNA having Genbank Accession Number NM_{—}001111285.1 (SEQ ID NO: 109);
the IRS1 mRNA having Genbank Accession Number NM_{—}005544.2 (SEQ ID NO: 111);
the FOSL2 mRNA having Genbank Accession Number NM_{—}005253.3 (SEQ ID NO: 113);
the HRAS mRNA having Genbank Accession Number NM_{—}001130442.1 (SEQ ID NO: 115);
the HRAS mRNA having Genbank Accession Number NM_{—}005343.2 (SEQ ID NO: 117);
the HRAS mRNA having Genbank Accession Number NM_{—}176795.3 (SEQ ID NO: 119);
the CLU mRNA having Genbank Accession Number NM_{—}001171138.1 (SEQ ID NO: 121);
the CLU mRNA having Genbank Accession Number NM_{—}001831.2 (SEQ ID NO: 123);
the CLU mRNA having Genbank Accession Number NM_{—}203339.1 (SEQ ID NO: 125);
the HSD17B1 mRNA having Genbank Accession Number NM_{—}000413.2 (SEQ ID NO: 127);
the HSDL1 mRNA having Genbank Accession Number NM_{—}001146051.1 (SEQ ID NO: 129);
the HSDL1 mRNA having Genbank Accession Number NM_{—}031463.4 (SEQ ID NO: 131);
the HSD11B2 mRNA having Genbank Accession Number NM_{—}000196.3 (SEQ ID NO: 133);
the STC1 mRNA having Genbank Accession Number NM_{—}003155.2 (SEQ ID NO: 135);
the CYP11A1 mRNA having Genbank Accession Number NM_{—}000781.2 (SEQ ID NO: 137);
the CYP11A1 mRNA having Genbank Accession Number NM_{—}001099773.1 (SEQ ID NO: 139);
the GMNN mRNA having Genbank Accession Number NM_{—}015895.3 (SEQ ID NO: 141);
the HSD3B2 mRNA having Genbank Accession Number NM_{—}000198.3 (SEQ ID NO: 143);
the HSD3B2 mRNA having Genbank Accession Number NM_{—}001166120.1 (SEQ ID NO: 145);
the CYP19A1 mRNA having Genbank Accession Number NM_{—}000103.3 (SEQ ID NO: 147);
the CYP19A1 mRNA having Genbank Accession Number NM_{—}031226.2 (SEQ ID NO: 149);
the IGFBP5 mRNA having Genbank Accession Number NM_{—}000599.3 (SEQ ID NO: 151);
the KCNK3 mRNA having Genbank Accession Number NM_{—}002246.2 (SEQ ID NO: 153);
the SMAD7 mRNA having Genbank Accession Number NM_{—}001190821.1 (SEQ ID NO: 155);
the SMAD7 mRNA having Genbank Accession Number NM_{—}001190822.1 (SEQ ID NO: 157);
the SMAD7 mRNA having Genbank Accession Number NM_{—}001190823.1 (SEQ ID NO: 159);
the SMAD7 mRNA having Genbank Accession Number NM_{—}005904.3 (SEQ ID NO: 161);
the EGR3 mRNA having Genbank Accession Number NM_{—}001199880.1 (SEQ ID NO: 163);
the EGR3 mRNA having Genbank Accession Number NM_{—}001199881.1 (SEQ ID NO: 165);
the EGR3 mRNA having Genbank Accession Number NM_{—}004430.2 (SEQ ID NO: 167);
the FN1 mRNA having Genbank Accession Number NM_{—}002026.2 (SEQ ID NO: 169);
the FN1 mRNA having Genbank Accession Number NM_{—}054034.2 (SEQ ID NO: 171);
the FN1 mRNA having Genbank Accession Number NM_{—}212474.1 (SEQ ID NO: 173);
the FN1 mRNA having Genbank Accession Number NM_{—}212476.1 (SEQ ID NO: 175);
the FN1 mRNA having Genbank Accession Number NM_{—}212478.1 (SEQ ID NO: 177); and
the FN1 mRNA having Genbank Accession Number NM_{—}212482.1 (SEQ ID NO: 179).

19. The method according to claim 2 wherein the marker gene expression level is determined by determining the level of polypeptide produced from said marker gene.

20. The method according to claim 19 wherein the polypeptide level is determined by Western blot, enzyme-linked immunosorbent assay, radioimmunoassay, fluorescence assay, chemiluminescence assay and aptamer-based assay.

21. The method according to claim 19 wherein the mammalian oocyte is an oocyte of a domesticated mammal.

22. The method according to claim 21 wherein the domesticated mammal is a bovine, pig or sheep.

23. The method according to claim 22 wherein the domesticated mammal is a bovine.

24. The method according to claim 23 wherein the level of at least one of the following polypeptides is determined:
the NEK6 polypeptide having Genbank Accession Number NP_{—}001092458.1 (SEQ ID NO: 182);
the AQP11 polypeptide having Genbank Accession Number NP_{—}001103539.1 (SEQ ID NO: 184);
the CCDC126 polypeptide having Genbank Accession Number NP_{—}001075941.1 (SEQ ID NO: 186);
the KLF6 polypeptide having Genbank Accession Number NP_{—}001030348.2 (SEQ ID NO: 188);
the ACPP polypeptide having Genbank Accession Number NP_{—}001092336.1 (SEQ ID NO: 190);
the IGFBP4 polypeptide having Genbank Accession Number NP_{—}776982.1 (SEQ ID NO: 192);
the IGF1 polypeptide having Genbank Accession Number NP_{—}001071296.1 (SEQ ID NO: 194);
the IRS1 polypeptide having Genbank Accession Number XP_{—}581382.2 (SEQ ID NO: 196);
the IRS1 polypeptide having Genbank Accession Number XP_{—}002685688.1 (SEQ ID NO: 198);
the FOSL2 polypeptide having Genbank Accession Number NP_{—}001179879.1 (SEQ ID NO: 200);
the FOSL2 polypeptide having Genbank Accession Number XP_{—}002691497.1 (SEQ ID NO: 202);
the HRAS polypeptide having Genbank Accession Number XP_{—}590626.2 (SEQ ID NO: 204);
the HRAS polypeptide having Genbank Accession Number XP_{—}879748.1 (SEQ ID NO: 206);
the HRAS polypeptide having Genbank Accession Number XP_{—}879663.1 (SEQ ID NO: 208);
the CLU polypeptide having Genbank Accession Number NP_{—}776327.1 (SEQ ID NO: 210);
the HSD17B1 polypeptide having Genbank Accession Number XP_{—}001253408.1 (SEQ ID NO: 212);
the HSD17B1 polypeptide having Genbank Accession Number NP_{—}001095835.1 (SEQ ID NO: 214);
the HSDL1 polypeptide having Genbank Accession Number NP_{—}001092341.1 (SEQ ID NO: 216);
the HSD11B2 polypeptide having Genbank Accession Number NP_{—}777067.1 (SEQ ID NO: 218);
the STC1 polypeptide having Genbank Accession Number NP_{—}788842.2 (SEQ ID NO: 220);
the CYP11A1 polypeptide having Genbank Accession Number NP_{—}788817.1 (SEQ ID NO: 222);
the GMNN polypeptide having Genbank Accession Number NP_{—}001020508.1 (SEQ ID NO: 224);
the CYP19A1 polypeptide having Genbank Accession Number NP_{—}776730.1 (SEQ ID NO: 226);
the IGFBP5 polypeptide having Genbank Accession Number NP_{—}001098797.1 (SEQ ID NO: 228);
the KCNK3 polypeptide having Genbank Accession Number XP_{—}597401.4 (SEQ ID NO: 230);
the KCNK3 polypeptide having Genbank Accession Number XP_{—}002691504.1 (SEQ ID NO: 232);
the SMAD7 polypeptide having Genbank Accession Number NP_{—}001179794.1 (SEQ ID NO: 234);
the SMAD7 polypeptide having Genbank Accession Number XP_{—}002697809.1 (SEQ ID NO: 236);
the SMAD7 polypeptide having Genbank Accession Number XP_{—}616030.3 (SEQ ID NO: 238);
the EGR3 polypeptide having Genbank Accession Number XP_{—}604596.4 (SEQ ID NO: 240);
the EGR3 polypeptide having Genbank Accession Number XP_{—}002689819.1 (SEQ ID NO: 242); and
the FN1 polypeptide having Genbank Accession Number NP_{—}001157250.1 (SEQ ID NO: 244).

25. The method according to claim 22 wherein the domesticated mammal is a pig.

26. The method according to claim 25 wherein the level of at least one of the following polypeptides is determined:
the KLF6 polypeptide having Genbank Accession Number NP_{—}001127825.1 (SEQ ID NO: 246);
the IGFBP4 polypeptide having Genbank Accession Number NP_{—}001116601.1 (SEQ ID NO: 248);
the IGF1 polypeptide having Genbank Accession Number NP_{—}999421.1 (SEQ ID NO: 250);
the HRAS polypeptide having Genbank Accession Number NP_{—}001038002.1 (SEQ ID NO: 252);
the CLU polypeptide having Genbank Accession Number NP_{—}999136.1 (SEQ ID NO: 254);
the HSD17B1 polypeptide having Genbank Accession Number NP_{—}001121944.1 (SEQ ID NO: 256);
the HSD11B2 polypeptide having Genbank Accession Number NP_{—}999078.1 (SEQ ID NO: 258);
the STC1 polypeptide having Genbank Accession Number NP_{—}001096682.1 (SEQ ID NO: 260);
the CYP11A1 polypeptide having Genbank Accession Number NP_{—}999592.1 (SEQ ID NO: 262);
the CYP19A1 polypeptide having Genbank Accession Number NP_{—}999594.1 (SEQ ID NO: 264);
the IGFBP5 polypeptide having Genbank Accession Number NP_{—}999264.1 (SEQ ID NO: 266);
the SMAD7 polypeptide having Genbank Accession Number XP_{—}001927617.1 (SEQ ID NO: 268);
the ACPP polypeptide having Genbank Accession Number XP_{—}003132467.1 (SEQ ID NO: 270);
the IRS1 polypeptide having Genbank Accession Number ACG59405.1 (SEQ ID NO: 272);
the EGR3 polypeptide having Genbank Accession Number XP_{—}003132855.1 (SEQ ID NO: 274);
the FN1 polypeptide having Genbank Accession Number XP_{—}003133689.1 (SEQ ID NO: 276);
the FN1 polypeptide having Genbank Accession Number XP_{—}003133690.1 (SEQ ID NO: 278); and
the FN1 polypeptide having Genbank Accession Number XP_{—}003133691.1 (SEQ ID NO: 280).

27. The method according to claim 19 wherein the mammalian oocyte is an oocyte of a human being.

28. The method according to claim 24 wherein the level of at least one of the following polypeptides is determined:
the NEK6 polypeptide having Genbank Accession Number NP_{—}001138473.1 (SEQ ID NO: 74):
the NEK6 polypeptide having Genbank Accession Number NP_{—}001159639.1 (SEQ ID NO: 76);
the NEK6 polypeptide having Genbank Accession Number NP_{—}001159640.1 (SEQ ID NO: 78);
the NEK6 polypeptide having Genbank Accession Number NP_{—}001159641.1 (SEQ ID NO: 80);
the NEK6 polypeptide having Genbank Accession Number NP_{—}001159642.1 (SEQ ID NO: 82);
the NEK6 polypeptide having Genbank Accession Number NP_{—}001159643.1 (SEQ ID NO: 84);
the NEK6 polypeptide having Genbank Accession Number NP_{—}055212.2 (SEQ ID NO: 86);
the AQP11 polypeptide having Genbank Accession Number NP_{—}766627.1 (SEQ ID NO: 88);
the CCDC126 polypeptide having Genbank Accession Number NP_{—}620126.2 (SEQ ID NO: 90);
the KLF6 polypeptide having Genbank Accession Number NP_{—}001153596.1 (SEQ ID NO: 92);
the KLF6 polypeptide having Genbank Accession Number NP_{—}001153597.1 (SEQ ID NO: 94);
the KLF6 polypeptide having Genbank Accession Number NP_{—}001291.3 (SEQ ID NO: 96);
the ACPP polypeptide having Genbank Accession Number NP_{—}001127666.1 (SEQ ID NO: 100);
the ACPP polypeptide having Genbank Accession Number NP_{—}001090.2 (SEQ ID NO: 98);
the IGFBP4 polypeptide having Genbank Accession Number NP_{—}001543.2 (SEQ ID NO: 102);
the IGF1 polypeptide having Genbank Accession Number NP_{—}000609.1 (SEQ ID NO: 104);
the IGF1 polypeptide having Genbank Accession Number NP_{—}001104753.1 (SEQ ID NO: 106);
the IGF1 polypeptide having Genbank Accession Number NP_{—}001104754.1 (SEQ ID NO: 108);
the IGF1 polypeptide having Genbank Accession Number NP_{—}001104755.1 (SEQ ID NO: 110);
the IRS1 polypeptide having Genbank Accession Number NP_{—}005535.1 (SEQ ID NO: 112);
the FOSL2 polypeptide having Genbank Accession Number NP_{—}005244.1 (SEQ ID NO: 114);
the HRAS polypeptide having Genbank Accession Number NP_{—}001123914.1 (SEQ ID NO: 116);
the HRAS polypeptide having Genbank Accession Number NP_{—}005334.1 (SEQ ID NO: 118);
the HRAS polypeptide having Genbank Accession Number NP_{—}789765.1 (SEQ ID NO: 120);
the CLU polypeptide having Genbank Accession Number NP_{—}001164609.1 (SEQ ID NO: 122);
the CLU polypeptide having Genbank Accession Number NP_{—}001822.2 (SEQ ID NO: 124);
the CLU polypeptide having Genbank Accession Number NP_{—}976084.1 (SEQ ID NO: 126);
the HSD17B1 polypeptide having Genbank Accession Number NP_{—}000404.2 (SEQ ID NO: 128);
the HSDL1 polypeptide having Genbank Accession Number NP_{—}001139523.1 (SEQ ID NO: 130);
the HSDL1 polypeptide having Genbank Accession Number NP_{—}113651.4 (SEQ ID NO: 132);
the HSD11B2 polypeptide having Genbank Accession Number NP_{—}000187.3 (SEQ ID NO: 134);
the STC1 polypeptide having Genbank Accession Number NP_{—}003146.1 (SEQ ID NO: 136);
the CYP11A1 polypeptide having Genbank Accession Number NP_{—}000772.2 (SEQ ID NO: 138);
the CYP11A1 polypeptide having Genbank Accession Number NP_{—}001093243.1 (SEQ ID NO: 140);
the GMNN polypeptide having Genbank Accession Number NP_{—}056979.1 (SEQ ID NO: 142);
the HSD3B2 polypeptide having Genbank Accession Number NP_{—}000189.1 (SEQ ID NO: 144);
the HSD3B2 polypeptide having Genbank Accession Number NP_{—}001159592.1 (SEQ ID NO: 146);
the CYP19A1 polypeptide having Genbank Accession Number NP_{—}000094.2 (SEQ ID NO: 148);
the CYP19A1 polypeptide having Genbank Accession Number NP_{—}112503.1 (SEQ ID NO: 150);
the IGFBP5 polypeptide having Genbank Accession Number NP_{—}000590.1 (SEQ ID NO: 152);
the KCNK3 polypeptide having Genbank Accession Number NP_{—}002237.1 (SEQ ID NO: 154);
the SMAD7 polypeptide having Genbank Accession Number NP_{—}001177750.1 (SEQ ID NO: 156);
the SMAD7 polypeptide having Genbank Accession Number NP_{—}001177751.1 (SEQ ID NO: 158);
the SMAD7 polypeptide having Genbank Accession Number NP_{—}001177752.1 (SEQ ID NO: 160);
the SMAD7 polypeptide having Genbank Accession Number NP_{—}005895.1 (SEQ ID NO: 162);
the EGR3 polypeptide having Genbank Accession Number NP_{—}001186809.1 (SEQ ID NO: 164);
the EGR3 polypeptide having Genbank Accession Number NP_{—}001186810.1 (SEQ ID NO: 166);
the EGR3 polypeptide having Genbank Accession Number NP_{—}004421.2 (SEQ ID NO: 168);
the FN1 polypeptide having Genbank Accession Number NP_{—}002017.1 (SEQ ID NO: 170);
the FN1 polypeptide having Genbank Accession Number NP_{—}473375.2 (SEQ ID NO: 172);
the FN1 polypeptide having Genbank Accession Number NP_{—}997639.1 (SEQ ID NO: 174);
the FN1 polypeptide having Genbank Accession Number NP_{—}997641.1 (SEQ ID NO: 176);
the FN1 polypeptide having Genbank Accession Number NP_{—}997643.1 (SEQ ID NO: 178); and
the FN1 polypeptide having Genbank Accession Number NP_{—}997647.1 (SEQ ID NO: 180).

29. A method for selecting a mammalian oocyte from a plurality of candidate oocytes for preservation or implantation comprising:
determining the level of expression of at least one marker gene of a set of marker genes comprising ACPP, AQP11, CCDC126, CLU, CYP11A1, CYP19A1, EGR3, FN1, FOSL2, GMNN, HRAS, HSD3B2, HSD17B1, HSD11B2, HSDL1, IGF1, IGFBP4, IGFBP5, IRS 1, KCNK3, KLF6, NEK6, SMAD7 and STC 1 in each of a plurality of samples, each sample being derived from a cumulus cell or a granulosa cell associated with a candidate oocyte;
(a) comparing the expression level of said at least one marker gene in the plurality of samples;
(b) selecting for preservation or implantation a candidate oocyte associated with a sample having a level of marker gene expression compared to the level of marker gene expression in other samples, which level of marker gene expression of said selected candidate is indicative of a higher probability of oocyte quality than at least one other oocyte in the plurality of candidate oocytes.

30. The method according to claim 29 wherein the level of expression of at least three of said marker genes is determined.

31. The method according to claim 30 wherein the marker genes comprise NEK6, AQP11 and IGF1.

32. The method according to claim 31 wherein the probability of a mammalian oocyte of high quality (P) is given by the equation:
P=e^{5.608+0.645x+0.100y-2.17z}/1+e^{.}e^{5.608+0.645x+0.100y-2.17z}
wherein:
x is the expression level of NEK6 relative to a control;
y is the expression level of AQP11 relative to a control; and
z is the expression level of IGF1 relative to a control.

33. The method according to claim 30 wherein the level of expression of at least ten of said marker genes is determined.

34. The method according to claim 29 wherein the marker gene expression level is determined by determining the level of mRNA produced from said marker gene.

35. The method according to claim 34 wherein the level of mRNA is determined by reverse transcription polymerase chain reaction.

36. The method according to claim 34 wherein the mammalian oocyte is an oocyte of a domesticated mammal.

37. The method according to claim 36 wherein the domesticated mammal is a bovine, sheep or pig.

38. The method according to claim 37 wherein the domesticated mammal is a bovine.

39. The method according to claim 38 wherein the level of at least one of the following mRNAs is determined:
the NEK6 mRNA having Genbank Accession Number NM_{—}001098988.1 (SEQ ID NO: 181);
the AQP 11 mRNA having Genbank Accession Number NM_{—}001110069.1 (SEQ ID NO: 183);
the CCDC126 mRNA having Genbank Accession Number NM_{—}001082472.2 (SEQ ID NO: 185);
the KLF6 mRNA having Genbank Accession Number NM_{—}001035271.2 (SEQ ID NO: 187);
the ACPP mRNA having Genbank Accession Number NM_{—}001098866.1 (SEQ ID NO: 189);
the IGFBP4 mRNA having Genbank Accession Number NM_{—}174557.3 (SEQ ID NO: 191);
the IGF1 mRNA having Genbank Accession Number NM_{—}001077828.1 (SEQ ID NO: 193);
the IRS1 mRNA having Genbank Accession Number XM_{—}581382.3 (SEQ ID NO: 195);
the IRS1 mRNA having Genbank Accession Number XM_{—}002685642.1 (SEQ ID NO: 197);
the FOSL2 mRNA having Genbank Accession Number NM_{—}001192950.1 (SEQ ID NO: 199);
the FOSL2 mRNA having Genbank Accession Number XM_{—}002691451.1 (SEQ ID NO: 201);
the HRAS mRNA having Genbank Accession Number XM_{—}590626.2 (SEQ ID NO: 203);
the HRAS mRNA having Genbank Accession Number XM_{—}874655.1 (SEQ ID NO: 205);
the HRAS mRNA having Genbank Accession Number XM_{—}874570.1 (SEQ ID NO: 207);
the CLU mRNA having Genbank Accession Number NM_{—}173902.2 (SEQ ID NO: 209);
the HSD17B1 mRNA having Genbank Accession Number XM_{—}001253407.1 (SEQ ID NO: 211);
the HSD17B1 mRNA having Genbank Accession Number NM_{—}001102365.1 (SEQ ID NO: 213);
the HSDL1 mRNA having Genbank Accession Number NM_{—}001098871.1 (SEQ ID NO: 215);
the HSD11B2 mRNA having Genbank Accession Number NM_{—}174642.1 (SEQ ID NO: 217);
the STC1 mRNA having Genbank Accession Number NM_{—}176669.3 (SEQ ID NO: 219);
the CYP11A1 mRNA having Genbank Accession Number NM_{—}176644.2 (SEQ ID NO: 221);
the GMNN mRNA having Genbank Accession Number NM_{—}001025337.1 (SEQ ID NO: 223);
the CYP19A1 mRNA having Genbank Accession Number NM_{—}174305.1 (SEQ ID NO: 225);
the IGFBP5 mRNA having Genbank Accession Number NM_{—}001105327.1 (SEQ ID NO: 227);
the KCNK3 mRNA having Genbank Accession Number XM_{—}597401.5 (SEQ ID NO: 229);
the KCNK3 mRNA having Genbank Accession Number XM_{—}002691458.1 (SEQ ID NO: 231);
the SMAD7 mRNA having Genbank Accession Number NM_{—}001192865.1 (SEQ ID NO: 233);
the SMAD7 mRNA having Genbank Accession Number XM_{—}002697763.1 (SEQ ID NO: 235);
the SMAD7 mRNA having Genbank Accession Number XM_{—}616030.3 (SEQ ID NO: 237);
the EGR3 mRNA having Genbank Accession Number XM_{—}604596.5 (SEQ ID NO: 239);
the EGR3 mRNA having Genbank Accession Number XM_{—}002689773.1 (SEQ ID NO: 241); and
the FN1 mRNA having Genbank Accession Number NM_{—}001163778.1 (SEQ ID NO: 243).

40. The method according to claim 37 wherein the domesticated mammal is a pig.

41. The method according to claim 40 wherein the level of at least one of the following mRNAs is determined:
the KLF6 mRNA having Genbank Accession Number NM_{—}001134353.2 (SEQ ID NO: 245;
the IGFBP4 mRNA having Genbank Accession Number NM_{—}001123129.1 (SEQ ID NO: 247);
the IGF1 mRNA having Genbank Accession Number NM_{—}214256.1 (SEQ ID NO: 249);
the HRAS mRNA having Genbank Accession Number NM_{—}001044537.1 (SEQ ID NO: 251);
the CLU mRNA having Genbank Accession Number NM_{—}213971.1 (SEQ ID NO: 253);
the HSD17B1 mRNA having Genbank Accession Number NM_{—}001128472.1 (SEQ ID NO: 255);
the HSD11B2 mRNA having Genbank Accession Number NM_{—}213913.1 (SEQ ID NO: 257);
the STC1 mRNA having Genbank Accession Number NM_{—}001103212.1 (SEQ ID NO: 259);
the CYP11A1 mRNA having Genbank Accession Number NM_{—}214427.1 (SEQ ID NO: 261);
the CYP19A1 mRNA having Genbank Accession Number NM_{—}214429.1 (SEQ ID NO: 263);
the IGFBP5 mRNA having Genbank Accession Number NM_{—}214099.1 (SEQ ID NO: 265);
the SMAD7 mRNA having Genbank Accession Number XM_{—}001927582.1 (SEQ ID NO: 267);
the ACPP mRNA having Genbank Accession Number XM_{—}003132419.1 (SEQ ID NO: 269);
the IRS1 mRNA having Genbank Accession Number EU681268.1 (SEQ ID NO: 271);
the EGR3 mRNA having Genbank Accession Number XM_{—}003132807.1 (SEQ ID NO: 273);
the FN1 mRNA having Genbank Accession Number XM_{—}003133641.1 (SEQ ID NO: 275);
the FN1 mRNA having Genbank Accession Number XM_{—}003133642.1 (SEQ ID NO: 277); and
the FN1 mRNA having Genbank Accession Number XM_{—}003133643.1 (SEQ ID NO: 279).

42. The method according to claim 34 wherein the mammalian oocyte is an oocyte of a human being.

43. The method according to claim 42 wherein the level of at least one of the following mRNAs is determined:
the NEK6 mRNA having Genbank Accession Number NM_{—}001145001.2 (SEQ ID NO: 73;
the NEK6 mRNA having Genbank Accession Number NM_{—}001166167.1 (SEQ ID NO: 75);
the NEK6 mRNA having Genbank Accession Number NM_{—}001166168.1 (SEQ ID NO: 77);
the NEK6 mRNA having Genbank Accession Number NM_{—}001166169.1 (SEQ ID NO: 79);
the NEK6 mRNA having Genbank Accession Number NM_{—}001166170.1 (SEQ ID NO: 81);
the NEK6 mRNA having Genbank Accession Number NM_{—}001166171.1 (SEQ ID NO: 83);
the NEK6 mRNA having Genbank Accession Number NM_{—}014397.5 (SEQ ID NO: 85);
the AQP11 mRNA having Genbank Accession Number NM_{—}173039.2 (SEQ ID NO: 87);
the CCDC126 mRNA having Genbank Accession Number NM_{—}138771.3 (SEQ ID NO: 89);
the KLF6 mRNA having Genbank Accession Number NM_{—}001160124.1 (SEQ ID NO: 91);
the KLF6 mRNA having Genbank Accession Number NM_{—}001160125.1 (SEQ ID NO: 93);
the KLF6 mRNA having Genbank Accession Number NM_{—}001300.5 (SEQ ID NO: 95);
the ACPP mRNA having Genbank Accession Number NM_{—}001134194.1 (SEQ ID NO: 99);
the ACPP mRNA having Genbank Accession Number NM_{—}001099.4 (SEQ ID NO: 97);
the IGFBP4 mRNA having Genbank Accession Number NM_{—}001552.2 (SEQ ID NO: 101);
the IGF1 mRNA having Genbank Accession Number NM_{—}000618.3 (SEQ ID NO: 103);
the IGF1 mRNA having Genbank Accession Number NM_{—}001111283.1 (SEQ ID NO: 105);
the IGF1 mRNA having Genbank Accession Number NM_{—}001111284.1 (SEQ ID NO: 107);
the IGF1 mRNA having Genbank Accession Number NM_{—}001111285.1 (SEQ ID NO: 109);
the IRS1 mRNA having Genbank Accession Number NM_{—}005544.2 (SEQ ID NO: 111);
the FOSL2 mRNA having Genbank Accession Number NM_{—}005253.3 (SEQ ID NO: 113);
the HRAS mRNA having Genbank Accession Number NM_{—}001130442.1 (SEQ ID NO: 115);
the HRAS mRNA having Genbank Accession Number NM_{—}005343.2 (SEQ ID NO: 117);
the HRAS mRNA having Genbank Accession Number NM_{—}176795.3 (SEQ ID NO: 119);
the CLU mRNA having Genbank Accession Number NM_{—}001171138.1 (SEQ ID NO: 121);
the CLU mRNA having Genbank Accession Number NM_{—}001831.2 (SEQ ID NO: 123);
the CLU mRNA having Genbank Accession Number NM_{—}203339.1 (SEQ ID NO: 125);
the HSD17B1 mRNA having Genbank Accession Number NM_{—}000413.2 (SEQ ID NO: 127);
the HSDL1 mRNA having Genbank Accession Number NM_{—}001146051.1 (SEQ ID NO: 129);
the HSDL1 mRNA having Genbank Accession Number NM_{—}031463.4 (SEQ ID NO: 131);
the HSD11B2 mRNA having Genbank Accession Number NM_{—}000196.3 (SEQ ID NO: 133);
the STC1 mRNA having Genbank Accession Number NM_{—}003155.2 (SEQ ID NO: 135);
the CYP11A1 mRNA having Genbank Accession Number NM_{—}000781.2 (SEQ ID NO: 137);
the CYP11A1 mRNA having Genbank Accession Number NM_{—}001099773.1 (SEQ ID NO: 139);
the GMNN mRNA having Genbank Accession Number NM_{—}015895.3 (SEQ ID NO: 141);
the HSD3B2 mRNA having Genbank Accession Number NM_{—}000198.3 (SEQ ID NO: 143);
the HSD3B2 mRNA having Genbank Accession Number NM_{—}001166120.1 (SEQ ID NO: 145);
the CYP19A1 mRNA having Genbank Accession Number NM_{—}000103.3 (SEQ ID NO: 147);
the CYP19A1 mRNA having Genbank Accession Number NM_{—}031226.2 (SEQ ID NO: 149);
the IGFBP5 mRNA having Genbank Accession Number NM_{—}000599.3 (SEQ ID NO: 151);
the KCNK3 mRNA having Genbank Accession Number NM_{—}002246.2 (SEQ ID NO: 153);
the SMAD7 mRNA having Genbank Accession Number NM_{—}001190821.1 (SEQ ID NO: 155);
the SMAD7 mRNA having Genbank Accession Number NM_{—}001190822.1 (SEQ ID NO: 157);
the SMAD7 mRNA having Genbank Accession Number NM_{—}001190823.1 (SEQ ID NO: 159);
the SMAD7 mRNA having Genbank Accession Number NM_{—}005904.3 (SEQ ID NO: 161);
the EGR3 mRNA having Genbank Accession Number NM_{—}001199880.1 (SEQ ID NO: 163);
the EGR3 mRNA having Genbank Accession Number NM_{—}001199881.1 (SEQ ID NO: 165);
the EGR3 mRNA having Genbank Accession Number NM_{—}004430.2 (SEQ ID NO: 167);
the FN1 mRNA having Genbank Accession Number NM_{—}002026.2 (SEQ ID NO: 169);
the FN1 mRNA having Genbank Accession Number NM_{—}054034.2 (SEQ ID NO: 171);
the FN1 mRNA having Genbank Accession Number NM_{—}212474.1 (SEQ ID NO: 173);
the FN1 mRNA having Genbank Accession Number NM_{—}212476.1 (SEQ ID NO: 175);
the FN1 mRNA having Genbank Accession Number NM_{—}212478.1 (SEQ ID NO: 177); and
the FN1 mRNA having Genbank Accession Number NM_{—}212482.1 (SEQ ID NO: 179).

44. The method according to claim 29 wherein the marker gene expression level is determined by determining the level of polypeptide produced from said marker gene.

45. The method according to claim 44 wherein the mammalian oocyte is an oocyte of a domesticated mammal.

46. The method according to claim 45 wherein the domesticated mammal is a bovine.

47. The method according to claim 46 wherein the level of at least one of the following polypeptides is determined:
the NEK6 polypeptide having Genbank Accession Number NP_{—}001092458.1 (SEQ ID NO: 182);
the AQP11 polypeptide having Genbank Accession Number NP_{—}001103539.1 (SEQ ID NO: 184);
the CCDC126 polypeptide having Genbank Accession Number NP_{—}001075941.1 (SEQ ID NO: 186);
the KLF6 polypeptide having Genbank Accession Number NP_{—}001030348.2 (SEQ ID NO: 188);
the ACPP polypeptide having Genbank Accession Number NP_{—}001092336.1 (SEQ ID NO: 190);
the IGFBP4 polypeptide having Genbank Accession Number NP_{—}776982.1 (SEQ ID NO: 192);
the IGF1 polypeptide having Genbank Accession Number NP_{—}001071296.1 (SEQ ID NO: 194);
the IRS 1 polypeptide having Genbank Accession Number XP_{—}581382.2 (SEQ ID NO: 196);
the IRS1 polypeptide having Genbank Accession Number XP_{—}002685688.1 (SEQ ID NO: 198);
the FOSL2 polypeptide having Genbank Accession Number NP_{—}001179879.1 (SEQ ID NO: 200);
the FOSL2 polypeptide having Genbank Accession Number XP_{—}002691497.1 (SEQ ID NO: 202);
the HRAS polypeptide having Genbank Accession Number XP_{—}590626.2 (SEQ ID NO: 204);
the HRAS polypeptide having Genbank Accession Number XP_{—}879748.1 (SEQ ID NO: 206);
the HRAS polypeptide having Genbank Accession Number XP_{—}879663.1 (SEQ ID NO: 208);
the CLU polypeptide having Genbank Accession Number NP_{—}776327.1 (SEQ ID NO: 210);
the HSD17B1 polypeptide having Genbank Accession Number XP_{—}001253408.1 (SEQ ID NO: 212);
the HSD17B1 polypeptide having Genbank Accession Number NP_{—}001095835.1 (SEQ ID NO: 214);
the HSDL1 polypeptide having Genbank Accession Number NP_{—}001092341.1 (SEQ ID NO: 216);
the HSD11B2 polypeptide having Genbank Accession Number NP_{—}777067.1 (SEQ ID NO: 218);
the STC1 polypeptide having Genbank Accession Number NP_{—}788842.2 (SEQ ID NO: 220);
the CYP11A1 polypeptide having Genbank Accession Number NP_{—}788817.1 (SEQ ID NO: 222);
the GMNN polypeptide having Genbank Accession Number NP_{—}001020508.1 (SEQ ID NO: 224);
the CYP19A1 polypeptide having Genbank Accession Number NP_{—}776730.1 (SEQ ID NO: 226);
the IGFBP5 polypeptide having Genbank Accession Number NP_{—}001098797.1 (SEQ ID NO: 228);
the KCNK3 polypeptide having Genbank Accession Number XP_{—}597401.4 (SEQ ID NO: 230);
the KCNK3 polypeptide having Genbank Accession Number XP_{—}002691504.1 (SEQ ID NO: 232);
the SMAD7 polypeptide having Genbank Accession Number NP_{—}001179794.1 (SEQ ID NO: 234);
the SMAD7 polypeptide having Genbank Accession Number XP_{—}002697809.1 (SEQ ID NO: 236);
the SMAD7 polypeptide having Genbank Accession Number XP_{—}616030.3 (SEQ ID NO: 238);
the EGR3 polypeptide having Genbank Accession Number XP_{—}604596.4 (SEQ ID NO: 240);
the EGR3 polypeptide having Genbank Accession Number XP_{—}002689819.1 (SEQ ID NO: 242); and
the FN1 polypeptide having Genbank Accession Number NP_{—}001157250.1 (SEQ ID NO: 244).

48. The method according to claim 45 wherein the domesticated mammal is a pig.

49. The method according to claim 48 wherein the level of at least one of the following polypeptides is determined:
the KLF6 polypeptide having Genbank Accession Number NP_{—}001127825.1 (SEQ ID NO: 246);
the IGFBP4 polypeptide having Genbank Accession Number NP_{—}001116601.1 (SEQ ID NO: 248);
the IGF1 polypeptide having Genbank Accession Number NP_{—}999421.1 (SEQ ID NO: 250);
the HRAS polypeptide having Genbank Accession Number NP_{—}001038002.1 (SEQ ID NO: 252);
the CLU polypeptide having Genbank Accession Number NP_{—}999136.1 (SEQ ID NO: 254);
the HSD17B1 polypeptide having Genbank Accession Number NP_{—}001121944.1 (SEQ ID NO: 256);
the HSD11B2 polypeptide having Genbank Accession Number NP_{—}999078.1 (SEQ ID NO: 258);
the STC1 polypeptide having Genbank Accession Number NP_{—}001096682.1 (SEQ ID NO: 260);
the CYP11A1 polypeptide having Genbank Accession Number NP_{—}999592.1 (SEQ ID NO: 262);
the CYP19A1 polypeptide having Genbank Accession Number NP_{—}999594.1 (SEQ ID NO: 264);
the IGFBP5 polypeptide having Genbank Accession Number NP_{—}999264.1 (SEQ ID NO: 266);
the SMAD7 polypeptide having Genbank Accession Number XP_{—}001927617.1 (SEQ ID NO: 268);
the ACPP polypeptide having Genbank Accession Number XP_{—}003132467.1 (SEQ ID NO: 270);
the IRS1 polypeptide having Genbank Accession Number ACG59405.1 (SEQ ID NO: 272);
the EGR3 polypeptide having Genbank Accession Number XP_{—}003132855.1 (SEQ ID NO: 274);
the FN1 polypeptide having Genbank Accession Number XP_{—}003133689.1 (SEQ ID NO: 276);
the FN1 polypeptide having Genbank Accession Number XP_{—}003133690.1 (SEQ ID NO: 278); and
the FN1 polypeptide having Genbank Accession Number XP_{—}003133691.1 (SEQ ID NO: 280).

50. The method according to claim 44 wherein the mammalian oocyte is an oocyte of a human being.

51. The method according to claim 50 wherein the level of at least one of the following polypeptides is determined:
the NEK6 polypeptide having Genbank Accession Number NP_{—}001138473.1 (SEQ ID NO: 74):
the NEK6 polypeptide having Genbank Accession Number NP_{—}001159639.1 (SEQ ID NO: 76);
the NEK6 polypeptide having Genbank Accession Number NP_{—}001159640.1 (SEQ ID NO: 78);
the NEK6 polypeptide having Genbank Accession Number NP_{—}001159641.1 (SEQ ID NO: 80);
the NEK6 polypeptide having Genbank Accession Number NP_{—}001159642.1 (SEQ ID NO: 82);
the NEK6 polypeptide having Genbank Accession Number NP_{—}001159643.1 (SEQ ID NO: 84);
the NEK6 polypeptide having Genbank Accession Number NP_{—}055212.2 (SEQ ID NO: 86);
the AQP11 polypeptide having Genbank Accession Number NP_{—}766627.1 (SEQ ID NO: 88);
the CCDC126 polypeptide having Genbank Accession Number NP_{—}620126.2 (SEQ ID NO: 90);
the KLF6 polypeptide having Genbank Accession Number NP_{—}001153596.1 (SEQ ID NO: 92);
the KLF6 polypeptide having Genbank Accession Number NP_{—}001153597.1 (SEQ ID NO: 94);
the KLF6 polypeptide having Genbank Accession Number NP_{—}001291.3 (SEQ ID NO: 96);
the ACPP polypeptide having Genbank Accession Number NP_{—}001127666.1 (SEQ ID NO: 100);
the ACPP polypeptide having Genbank Accession Number NP_{—}001090.2 (SEQ ID NO: 98);
the IGFBP4 polypeptide having Genbank Accession Number NP_{—}001543.2 (SEQ ID NO: 102);
the IGF1 polypeptide having Genbank Accession Number NP_{—}000609.1 (SEQ ID NO: 104);
the IGF1 polypeptide having Genbank Accession Number NP_{—}001104753.1 (SEQ ID NO: 106);
the IGF1 polypeptide having Genbank Accession Number NP_{—}001104754.1 (SEQ ID NO: 108);
the IGF1 polypeptide having Genbank Accession Number NP_{—}001104755.1 (SEQ ID NO: 110);
the IRS1 polypeptide having Genbank Accession Number NP_{—}005535.1 (SEQ ID NO: 112);
the FOSL2 polypeptide having Genbank Accession Number NP_{—}005244.1 (SEQ ID NO: 114);
the HRAS polypeptide having Genbank Accession Number NP_{—}001123914.1 (SEQ ID NO: 116);
the HRAS polypeptide having Genbank Accession Number NP_{—}005334.1 (SEQ ID NO: 118);
the HRAS polypeptide having Genbank Accession Number NP_{—}789765.1 (SEQ ID NO: 120);
the CLU polypeptide having Genbank Accession Number NP_{—}001164609.1 (SEQ ID NO: 122);
the CLU polypeptide having Genbank Accession Number NP_{—}001822.2 (SEQ ID NO: 124);
the CLU polypeptide having Genbank Accession Number NP_{—}976084.1 (SEQ ID NO: 126);
the HSD17B1 polypeptide having Genbank Accession Number NP_{—}000404.2 (SEQ ID NO: 128);
the HSDL1 polypeptide having Genbank Accession Number NP_{—}001139523.1 (SEQ ID NO: 130);
the HSDL1 polypeptide having Genbank Accession Number NP_{—}113651.4 (SEQ ID NO: 132);
the HSD11B2 polypeptide having Genbank Accession Number NP_{—}000187.3 (SEQ ID NO: 134);
the STC1 polypeptide having Genbank Accession Number NP_{—}003146.1 (SEQ ID NO: 136);
the CYP11A1 polypeptide having Genbank Accession Number NP_{—}000772.2 (SEQ ID NO: 138);
the CYP11A1 polypeptide having Genbank Accession Number NP_{—}001093243.1 (SEQ ID NO: 140);
the GMNN polypeptide having Genbank Accession Number NP_{—}056979.1 (SEQ ID NO: 142);
the HSD3B2 polypeptide having Genbank Accession Number NP_{—}000189.1 (SEQ ID NO: 144);
the HSD3B2 polypeptide having Genbank Accession Number NP_{—}001159592.1 (SEQ ID NO: 146);
the CYP19A1 polypeptide having Genbank Accession Number NP_{—}000094.2 (SEQ ID NO: 148);
the CYP19A1 polypeptide having Genbank Accession Number NP_{—}112503.1 (SEQ ID NO: 150);
the IGFBP5 polypeptide having Genbank Accession Number NP_{—}000590.1 (SEQ ID NO: 152);
the KCNK3 polypeptide having Genbank Accession Number NP_{—}002237.1 (SEQ ID NO: 154);
the SMAD7 polypeptide having Genbank Accession Number NP_{—}001177750.1 (SEQ ID NO: 156);
the SMAD7 polypeptide having Genbank Accession Number NP_{—}001177751.1 (SEQ ID NO: 158);
the SMAD7 polypeptide having Genbank Accession Number NP_{—}001177752.1 (SEQ ID NO: 160);
the SMAD7 polypeptide having Genbank Accession Number NP_{—}005895.1 (SEQ ID NO: 162);
the EGR3 polypeptide having Genbank Accession Number NP_{—}001186809.1 (SEQ ID NO: 164);
the EGR3 polypeptide having Genbank Accession Number NP_{—}001186810.1 (SEQ ID NO: 166);
the EGR3 polypeptide having Genbank Accession Number NP_{—}004421.2 (SEQ ID NO: 168);
the FN1 polypeptide having Genbank Accession Number NP_{—}002017.1 (SEQ ID NO: 170);
the FN1 polypeptide having Genbank Accession Number NP_{—}473375.2 (SEQ ID NO: 172);
the FN1 polypeptide having Genbank Accession Number NP_{—}997639.1 (SEQ ID NO: 174);
the FN1 polypeptide having Genbank Accession Number NP_{—}997641.1 (SEQ ID NO: 176);
the FN1 polypeptide having Genbank Accession Number NP_{—}997643.1 (SEQ ID NO: 178); and
the FN1 polypeptide having Genbank Accession Number NP_{—}997647.1 (SEQ ID NO: 180).

52. A kit for evaluating mammalian oocyte quality comprising: a set of reagents that specifically detects the expression levels of one or more marker genes of a mammal comprising ACPP, AQP11, CCDC126, CLU, CYP11A1, CYP19A1, EGR3, FN1, FOSL2, GMNN, HRAS, HSD3B2, HSD17B1, HSD11B2, HSDL1, IGF1, IGFBP4, IGFBP5, IRS1, KCNK3, KLF6, NEK6, SMAD7 or STC1; and instructions for using said kit for evaluating oocyte quality.

53. The kit of claim 52, wherein the set of reagents detects mRNA expressed from said one or more marker genes.

54. The kit of claim 53, wherein the set of reagents comprises nucleic acid probes complementary to mRNA expressed from said one or more marker genes.

55. The kit of claim 54, wherein the nucleic acid probes complementary to mRNA are immobilized on a substrate surface.

56. The kit according to claim 53 wherein the set of reagents detect mRNA expressed from one or more marker genes of a domesticated mammal.

57. The kit according to claim 56 wherein the domesticated mammal is a bovine, sheep or pig.

58. The kit according to claim 57 wherein the domesticated mammal is a bovine.

59. The kit according to claim 58 wherein the set of reagents detects one or more of the following mRNAs:
the NEK6 mRNA having Genbank Accession Number NM_{—}001098988.1 (SEQ ID NO: 181);
the AQP11 mRNA having Genbank Accession Number NM_{—}001110069.1 (SEQ ID NO: 183);
the CCDC126 mRNA having Genbank Accession Number NM_{—}001082472.2 (SEQ ID NO: 185);
the KLF6 mRNA having Genbank Accession Number NM_{—}001035271.2 (SEQ ID NO: 187);
the ACPP mRNA having Genbank Accession Number NM_{—}001098866.1 (SEQ ID NO: 189);
the IGFBP4 mRNA having Genbank Accession Number NM_{—}174557.3 (SEQ ID NO: 191);
the IGF1 mRNA having Genbank Accession Number NM_{—}001077828.1 (SEQ ID NO: 193);
the IRS1 mRNA having Genbank Accession Number XM_{—}581382.3 (SEQ ID NO: 195);
the IRS1 mRNA having Genbank Accession Number XM_{—}002685642.1 (SEQ ID NO: 197);
the FOSL2 mRNA having Genbank Accession Number NM_{—}001192950.1(SEQ ID NO: 199);
the FOSL2 mRNA having Genbank Accession Number XM_{—}002691451.1(SEQ ID NO: 201);
the HRAS mRNA having Genbank Accession Number XM_{—}590626.2 (SEQ ID NO: 203);
the HRAS mRNA having Genbank Accession Number XM_{—}874655.1 (SEQ ID NO: 205);
the HRAS mRNA having Genbank Accession Number XM_{—}874570.1 (SEQ ID NO: 207);
the CLU mRNA having Genbank Accession Number NM_{—}173902.2 (SEQ ID NO: 209);
the HSD17B1 mRNA having Genbank Accession Number XM_{—}001253407.1 (SEQ ID NO: 211);
the HSD17B1 mRNA having Genbank Accession Number NM_{—}001102365.1 (SEQ ID NO: 213);
the HSDL1 mRNA having Genbank Accession Number NM_{—}001098871.1 (SEQ ID NO: 215);
the HSD11B2 mRNA having Genbank Accession Number NM_{—}174642.1 (SEQ ID NO: 217);
the STC1 mRNA having Genbank Accession Number NM_{—}176669.3 (SEQ ID NO: 219);
the CYP11A1 mRNA having Genbank Accession Number NM_{—}176644.2 (SEQ ID NO: 221);
the GMNN mRNA having Genbank Accession Number NM_{—}001025337.1 (SEQ ID NO: 223);
the CYP19A1 mRNA having Genbank Accession Number NM_{—}174305.1 (SEQ ID NO: 225);
the IGFBP5 mRNA having Genbank Accession Number NM_{—}001105327.1 (SEQ ID NO: 227);
the KCNK3 mRNA having Genbank Accession Number XM_{—}597401.5 (SEQ ID NO: 229);
the KCNK3 mRNA having Genbank Accession Number XM_{—}002691458.1 (SEQ ID NO: 231);
the SMAD7 mRNA having Genbank Accession Number NM_{—}001192865.1 (SEQ ID NO: 233);
the SMAD7 mRNA having Genbank Accession Number XM_{—}002697763.1 (SEQ ID NO: 235);
the SMAD7 mRNA having Genbank Accession Number XM_{—}616030.3 (SEQ ID NO: 237);
the EGR3 mRNA having Genbank Accession Number XM_{—}604596.5 (SEQ ID NO: 239);
the EGR3 mRNA having Genbank Accession Number XM_{—}002689773.1 (SEQ ID NO: 241); and
the FN1 mRNA having Genbank Accession Number NM_{—}001163778.1 (SEQ ID NO: 243).

60. The kit according to claim 57 wherein the domesticated mammal is a pig.

61. The method according to claim 60 wherein the level of at least one of the following mRNAs is determined:
the KLF6 mRNA having Genbank Accession Number NM_{—}001134353.2 (SEQ ID NO: 245);
the IGFBP4 mRNA having Genbank Accession Number NM_{—}001123129.1 (SEQ ID NO: 247);
the IGF1 mRNA having Genbank Accession Number NM_{—}214256.1 (SEQ ID NO: 249);
the HRAS mRNA having Genbank Accession Number NM_{—}001044537.1 (SEQ ID NO: 251);
the CLU mRNA having Genbank Accession Number NM_{—}213971.1 (SEQ ID NO: 253);
the HSD17B1 mRNA having Genbank Accession Number NM_{—}001128472.1 (SEQ ID NO: 255);
the HSD11B2 mRNA having Genbank Accession Number NM_{—}213913.1 (SEQ ID NO: 257);
the STC1 mRNA having Genbank Accession Number NM_{—}001103212.1 (SEQ ID NO: 259);
the CYP11A1 mRNA having Genbank Accession Number NM_{—}214427.1 (SEQ ID NO: 261);
the CYP19A1 mRNA having Genbank Accession Number NM_{—}214429.1 (SEQ ID NO: 263);
the IGFBP5 mRNA having Genbank Accession Number NM_{—}214099.1 (SEQ ID NO: 265);
the SMAD7 mRNA having Genbank Accession Number XM_{—}001927582.1 (SEQ ID NO: 267);
the ACPP mRNA having Genbank Accession Number XM_{—}003132419.1 (SEQ ID NO: 269);
the IRS1 mRNA having Genbank Accession Number EU681268.1 (SEQ ID NO: 271);
the EGR3 mRNA having Genbank Accession Number XM_{—}003132807.1 (SEQ ID NO: 273);
the FN1 mRNA having Genbank Accession Number XM_{—}003133641.1 (SEQ ID NO: 275);
the FN1 mRNA having Genbank Accession Number XM_{—}003133642.1 (SEQ ID NO: 277); and
the FN1 mRNA having Genbank Accession Number XM_{—}003133643.1 (SEQ ID NO: 279).

62. The kit according to claim 53 wherein the set of reagents detects mRNA expressed from one or more marker genes of a human being.

63. The kit according to claim 62 wherein the set of reagents detects one or more of the following mRNAs:
the NEK6 mRNA having Genbank Accession Number NM_{—}001145001.2 (SEQ ID NO: 73);
the NEK6 mRNA having Genbank Accession Number NM_{—}001166167.1 (SEQ ID NO: 75);
the NEK6 mRNA having Genbank Accession Number NM_{—}001166168.1 (SEQ ID NO: 77);
the NEK6 mRNA having Genbank Accession Number NM_{—}001166169.1 (SEQ ID NO: 79);
the NEK6 mRNA having Genbank Accession Number NM_{—}001166170.1 (SEQ ID NO: 81);
the NEK6 mRNA having Genbank Accession Number NM_{—}001166171.1 (SEQ ID NO: 83);
the NEK6 mRNA having Genbank Accession Number NM_{—}014397.5 (SEQ ID NO: 85);
the AQP11 mRNA having Genbank Accession Number NM_{—}173039.2 (SEQ ID NO: 87);
the CCDC126 mRNA having Genbank Accession Number NM_{—}138771.3 (SEQ ID NO: 89);
the KLF6 mRNA having Genbank Accession Number NM_{—}001160124.1 (SEQ ID NO: 91);
the KLF6 mRNA having Genbank Accession Number NM_{—}01160125.1 (SEQ ID NO: 93);
the KLF6 mRNA having Genbank Accession Number NM_{—}001300.5 (SEQ ID NO: 95);
the ACPP mRNA having Genbank Accession Number NM_{—}001134194.1 (SEQ ID NO: 99);
the ACPP mRNA having Genbank Accession Number NM_{—}001099.4 (SEQ ID NO: 97);
the IGFBP4 mRNA having Genbank Accession Number NM_{—}001552.2 (SEQ ID NO: 101);
the IGF1 mRNA having Genbank Accession Number NM_{—}000618.3 (SEQ ID NO: 103);
the IGF1 mRNA having Genbank Accession Number NM_{—}001111283.1 (SEQ ID NO: 105);
the IGF1 mRNA having Genbank Accession Number NM_{—}001111284.1 (SEQ ID NO: 107);
the IGF1 mRNA having Genbank Accession Number NM_{—}001111285.1 (SEQ ID NO: 109);
the IRS1 mRNA having Genbank Accession Number NM_{—}005544.2 (SEQ ID NO: 111);
the FOSL2 mRNA having Genbank Accession Number NM_{—}005253.3 (SEQ ID NO: 113);
the HRAS mRNA having Genbank Accession Number NM_{—}001130442.1 (SEQ ID NO: 115);
the HRAS mRNA having Genbank Accession Number NM_{—}005343.2 (SEQ ID NO: 117);
the HRAS mRNA having Genbank Accession Number NM_{—}176795.3 (SEQ ID NO: 119);
the CLU mRNA having Genbank Accession Number NM_{—}001171138.1 (SEQ ID NO: 121);
the CLU mRNA having Genbank Accession Number NM_{—}001831.2 (SEQ ID NO: 123);
the CLU mRNA having Genbank Accession Number NM_{—}203339.1 (SEQ ID NO: 125);
the HSD17B1 mRNA having Genbank Accession Number NM_{—}000413.2 (SEQ ID NO: 127);
the HSDL1 mRNA having Genbank Accession Number NM_{—}001146051.1 (SEQ ID NO: 129);
the HSDL1 mRNA having Genbank Accession Number NM_{—}031463.4 (SEQ ID NO: 131);
the HSD11B2 mRNA having Genbank Accession Number NM_{—}000196.3 (SEQ ID NO: 133);
the STC1 mRNA having Genbank Accession Number NM_{—}003155.2 (SEQ ID NO: 135);
the CYP11A1 mRNA having Genbank Accession Number NM_{—}000781.2 (SEQ ID NO: 137);
the CYP11A1 mRNA having Genbank Accession Number NM_{—}001099773.1 (SEQ ID NO: 139);
the GMNN mRNA having Genbank Accession Number NM_{—}015895.3 (SEQ ID NO: 141);
the HSD3B2 mRNA having Genbank Accession Number NM_{—}000198.3 (SEQ ID NO: 143);
the HSD3B2 mRNA having Genbank Accession Number NM_{—}001166120.1 (SEQ ID NO: 145);
the CYP19A1 mRNA having Genbank Accession Number NM_{—}000103.3 (SEQ ID NO: 147);
the CYP19A1 mRNA having Genbank Accession Number NM_{—}031226.2 (SEQ ID NO: 149);
the IGFBP5 mRNA having Genbank Accession Number NM_{—}000599.3 (SEQ ID NO: 151);
the KCNK3 mRNA having Genbank Accession Number NM_{—}002246.2 (SEQ ID NO: 153);
the SMAD7 mRNA having Genbank Accession Number NM_{—}001190821.1 (SEQ ID NO: 155);
the SMAD7 mRNA having Genbank Accession Number NM_{—}001190822.1 (SEQ ID NO: 157);
the SMAD7 mRNA having Genbank Accession Number NM_{—}001190823.1 (SEQ ID NO: 159);
the SMAD7 mRNA having Genbank Accession Number NM_{—}005904.3 (SEQ ID NO: 161);
the EGR3 mRNA having Genbank Accession Number NM_{—}001199880.1 (SEQ ID NO: 163);
the EGR3 mRNA having Genbank Accession Number NM_{—}001199881.1 (SEQ ID NO: 165);
the EGR3 mRNA having Genbank Accession Number NM_{—}004430.2 (SEQ ID NO: 167);
the FN1 mRNA having Genbank Accession Number NM_{—}002026.2 (SEQ ID NO: 169);
the FN1 mRNA having Genbank Accession Number NM_{—}054034.2 (SEQ ID NO: 171);
the FN1 mRNA having Genbank Accession Number NM_{—}212474.1 (SEQ ID NO: 173);
the FN1 mRNA having Genbank Accession Number NM_{—}212476.1 (SEQ ID NO: 175);
the FN1 mRNA having Genbank Accession Number NM_{—}212478.1 (SEQ ID NO: 177); and
the FN1 mRNA having Genbank Accession Number NM_{—}212482.1 (SEQ ID NO: 179).

64. The kit of claim 52, wherein the set of reagents detects polypeptides encoded by said one or more marker genes.

65. The kit of claim 64, wherein the set of reagents comprises antibodies or aptamers that specifically bind to the polypeptides encoded by said one or more marker genes.

66. The kit according to claim 64 wherein the set of reagents detects polypeptides encoded by one or more marker genes of a domesticated mammal.

67. The kit according to claim 66 wherein the domesticated mammal is a bovine, sheep or pig.

68. The kit according to claim 67 wherein the domesticated mammal is a bovine,

69. The kit according to claim 68 wherein the set of reagents detects one or more of the following polypeptides:
the NEK6 polypeptide having Genbank Accession Number NP_{—}001092458.1 (SEQ ID NO: 182);
the AQP11 polypeptide having Genbank Accession Number NP_{—}001103539.1 (SEQ ID NO: 184);
the CCDC126 polypeptide having Genbank Accession Number NP_{—}001075941.1 (SEQ ID NO: 186);
the KLF6 polypeptide having Genbank Accession Number NP_{—}001030348.2 (SEQ ID NO: 188);
the ACPP polypeptide having Genbank Accession Number NP_{—}001092336.1 (SEQ ID NO: 190);
the IGFBP4 polypeptide having Genbank Accession Number NP_{—}776982.1 (SEQ ID NO: 192);
the IGF1 polypeptide having Genbank Accession Number NP_{—}001071296.1 (SEQ ID NO: 194);
the IRS1 polypeptide having Genbank Accession Number XP_{—}581382.2 (SEQ ID NO: 196);
the IRS1 polypeptide having Genbank Accession Number XP_{—}002685688.1 (SEQ ID NO: 198);
the FOSL2 polypeptide having Genbank Accession Number NP_{—}001179879.1 (SEQ ID NO: 200);
the FOSL2 polypeptide having Genbank Accession Number XP_{—}002691497.1 (SEQ ID NO: 202);
the HRAS polypeptide having Genbank Accession Number XP_{—}590626.2 (SEQ ID NO: 204);
the HRAS polypeptide having Genbank Accession Number XP_{—}879748.1 (SEQ ID NO: 206);
the HRAS polypeptide having Genbank Accession Number XP_{—}879663.1 (SEQ ID NO: 208);
the CLU polypeptide having Genbank Accession Number NP 776327.1 (SEQ ID NO: 210);
the HSD17B1 polypeptide having Genbank Accession Number XP_{—}001253408.1 (SEQ ID NO: 212);
the HSD17B1 polypeptide having Genbank Accession Number NP_{—}001095835.1 (SEQ ID NO: 214);
the HSDL1 polypeptide having Genbank Accession Number NP_{—}001092341.1 (SEQ ID NO: 216);
the HSD11B2 polypeptide having Genbank Accession Number NP_{—}777067.1 (SEQ ID NO: 218);
the STC1 polypeptide having Genbank Accession Number NP_{—}788842.2 (SEQ ID NO: 220);
the CYP11A1 polypeptide having Genbank Accession Number NP_{—}788817.1 (SEQ ID NO: 222);
the GMNN polypeptide having Genbank Accession Number NP_{—}001020508.1 (SEQ ID NO: 224);
the CYP19A1 polypeptide having Genbank Accession Number NP_{—}776730.1 (SEQ ID NO: 226);
the IGFBP5 polypeptide having Genbank Accession Number NP_{—}001098797.1 (SEQ ID NO: 228);
the KCNK3 polypeptide having Genbank Accession Number XP_{—}597401.4 (SEQ ID NO: 230);
the KCNK3 polypeptide having Genbank Accession Number XP_{—}002691504.1 (SEQ ID NO: 232);
the SMAD7 polypeptide having Genbank Accession Number NP_{—}001179794.1 (SEQ ID NO: 234);
the SMAD7 polypeptide having Genbank Accession Number XP_{—}002697809.1 (SEQ ID NO: 236);
the SMAD7 polypeptide having Genbank Accession Number XP_{—}616030.3 (SEQ ID NO: 238);
the EGR3 polypeptide having Genbank Accession Number XP_{—}604596.4 (SEQ ID NO: 240);
the EGR3 polypeptide having Genbank Accession Number XP_{—}002689819.1 (SEQ ID NO: 242); and
the FN1 polypeptide having Genbank Accession Number NP_{—}001157250.1 (SEQ ID NO: 244).

70. The kit according to claim 67 wherein the domesticated mammal is a pig.

71. The kit according to claim 70 wherein the level of at least one of the following polypeptides is determined:
the KLF6 polypeptide having Genbank Accession Number NP_{—}001127825.1 (SEQ ID NO: 246);
the IGFBP4 polypeptide having Genbank Accession Number NP_{—}001116601.1 (SEQ ID NO: 248);
the IGF1 polypeptide having Genbank Accession Number NP_{—}999421.1 (SEQ ID NO: 250);
the HRAS polypeptide having Genbank Accession Number NP_{—}001038002.1 (SEQ ID NO: 252);
the CLU polypeptide having Genbank Accession Number NP_{—}999136.1 (SEQ ID NO: 254);
the HSD17B1 polypeptide having Genbank Accession Number NP_{—}001121944.1 (SEQ ID NO: 256);
the HSD11B2 polypeptide having Genbank Accession Number NP_{—}999078.1 (SEQ ID NO: 258);
the STC1 polypeptide having Genbank Accession Number NP_{—}001096682.1 (SEQ ID NO: 260);
the CYP11A1 polypeptide having Genbank Accession Number NP_{—}999592.1 (SEQ ID NO: 262);
the CYP19A1 polypeptide having Genbank Accession Number NP_{—}999594.1 (SEQ ID NO: 264);
the IGFBP5 polypeptide having Genbank Accession Number NP_{—}999264.1 (SEQ ID NO: 266);
the SMAD7 polypeptide having Genbank Accession Number XP_{—}001927617.1 (SEQ ID NO: 268);
the ACPP polypeptide having Genbank Accession Number XP_{—}003132467.1 (SEQ ID NO: 270);
the IRS1 polypeptide having Genbank Accession Number ACG59405.1 (SEQ ID NO: 272);
the EGR3 polypeptide having Genbank Accession Number XP_{—}003132855.1 (SEQ ID NO: 274);
the FN1 polypeptide having Genbank Accession Number XP_{—}003133689.1 (SEQ ID NO: 276);
the FN1 polypeptide having Genbank Accession Number XP_{—}003133690.1 (SEQ ID NO: 278); and
the FN1 polypeptide having Genbank Accession Number XP_{—}003133691.1 (SEQ ID NO: 280).

72. The kit according to claim 64 wherein the set of reagents detects polypeptides encoded by one or more marker genes of a human being.

73. The kit according to claim 72 wherein the set of reagents detects one or more of the following polypeptides.
the NEK6 polypeptide having Genbank Accession Number NP_{—}001138473.1 (SEQ ID NO: 74):
the NEK6 polypeptide having Genbank Accession Number NP_{—}001159639.1 (SEQ ID NO: 76);
the NEK6 polypeptide having Genbank Accession Number NP_{—}001159640.1 (SEQ ID NO: 78);
the NEK6 polypeptide having Genbank Accession Number NP_{—}001159641.1 (SEQ ID NO: 80);
the NEK6 polypeptide having Genbank Accession Number NP_{—}001159642.1 (SEQ ID NO: 82);
the NEK6 polypeptide having Genbank Accession Number NP_{—}001159643.1 (SEQ ID NO: 84);
the NEK6 polypeptide having Genbank Accession Number NP_{—}055212.2 (SEQ ID NO: 86);
the AQP11 polypeptide having Genbank Accession Number NP_{—}766627.1 (SEQ ID NO: 88);
the CCDC 126 polypeptide having Genbank Accession Number NP_{—}620126.2 (SEQ ID NO: 90);
the KLF6 polypeptide having Genbank Accession Number NP_{—}001153596.1 (SEQ ID NO: 92);
the KLF6 polypeptide having Genbank Accession Number NP_{—}001153597.1 (SEQ ID NO: 94);
the KLF6 polypeptide having Genbank Accession Number NP_{—}001291.3 (SEQ ID NO: 96);
the ACPP polypeptide having Genbank Accession Number NP_{—}001127666.1 (SEQ ID NO: 100);
the ACPP polypeptide having Genbank Accession Number NP_{—}001090.2 (SEQ ID NO: 98);
the IGFBP4 polypeptide having Genbank Accession Number NP_{—}001543.2 (SEQ ID NO: 102);
the IGF1 polypeptide having Genbank Accession Number NP_{—}000609.1 (SEQ ID NO: 104);
the IGF1 polypeptide having Genbank Accession Number NP_{—}001104753.1 (SEQ ID NO: 106);
the IGF1 polypeptide having Genbank Accession Number NP_{—}001104754.1 (SEQ ID NO: 108);
the IGF1 polypeptide having Genbank Accession Number NP_{—}001104755.1 (SEQ ID NO: 110);
the IRS1 polypeptide having Genbank Accession Number NP_{—}005535.1 (SEQ ID NO: 112);
the FOSL2 polypeptide having Genbank Accession Number NP_{—}005244.1 (SEQ ID NO: 114);
the HRAS polypeptide having Genbank Accession Number NP_{—}001123914.1 (SEQ ID NO: 116);
the HRAS polypeptide having Genbank Accession Number NP_{—}005334.1 (SEQ ID NO: 118);
the HRAS polypeptide having Genbank Accession Number NP_{—}789765.1 (SEQ ID NO: 120);
the CLU polypeptide having Genbank Accession Number NP_{—}001164609.1 (SEQ ID NO: 122);
the CLU polypeptide having Genbank Accession Number NP_{—}001822.2 (SEQ ID NO: 124);
the CLU polypeptide having Genbank Accession Number NP_{—}976084.1 (SEQ ID NO: 126);
the HSD17B1 polypeptide having Genbank Accession Number NP 000404.2 (SEQ ID NO: 128);
the HSDL1 polypeptide having Genbank Accession Number NP_{—}001139523.1 (SEQ ID NO: 130);
the HSDL1 polypeptide having Genbank Accession Number NP_{—}113651.4 (SEQ ID NO: 132);
the HSD11B2 polypeptide having Genbank Accession Number NP_{—}000187.3 (SEQ ID NO: 134);
the STC1 polypeptide having Genbank Accession Number NP_{—}003146.1 (SEQ ID NO: 136);
the CYP11A1 polypeptide having Genbank Accession Number NP_{—}000772.2 (SEQ ID NO: 138);
the CYP11A1 polypeptide having Genbank Accession Number NP_{—}001093243.1 (SEQ ID NO: 140);
the GMNN polypeptide having Genbank Accession Number NP_{—}056979.1 (SEQ ID NO: 142);
the HSD3B2 polypeptide having Genbank Accession Number NP_{—}000189.1 (SEQ ID NO: 144);
the HSD3B2 polypeptide having Genbank Accession Number NP_{—}001159592.1 (SEQ ID NO: 146);
the CYP19A1 polypeptide having Genbank Accession Number NP_{—}000094.2 (SEQ ID NO: 148);
the CYP19A1 polypeptide having Genbank Accession Number NP_{—}112503.1 (SEQ ID NO: 150);
the IGFBP5 polypeptide having Genbank Accession Number NP 000590.1 (SEQ ID NO: 152);
the KCNK3 polypeptide having Genbank Accession Number NP_{—}002237.1 (SEQ ID NO: 154);
the SMAD7 polypeptide having Genbank Accession Number NP_{—}001177750.1 (SEQ ID NO: 156);
the SMAD7 polypeptide having Genbank Accession Number NP_{—}001177751.1 (SEQ ID NO: 158);
the SMAD7 polypeptide having Genbank Accession Number NP_{—}001177752.1 (SEQ ID NO: 160);
the SMAD7 polypeptide having Genbank Accession Number NP_{—}005895.1 (SEQ ID NO: 162);
the EGR3 polypeptide having Genbank Accession Number NP 001186809.1 (SEQ ID NO: 164);
the EGR3 polypeptide having Genbank Accession Number NP_{—}001186810.1 (SEQ ID NO: 166);
the EGR3 polypeptide having Genbank Accession Number NP_{—}004421.2 (SEQ ID NO: 168);
the FN1 polypeptide having Genbank Accession Number NP_{—}002017.1 (SEQ ID NO: 170);
the FN1 polypeptide having Genbank Accession Number NP_{—}473375.2 (SEQ ID NO: 172);
the FN1 polypeptide having Genbank Accession Number NP_{—}997639.1 (SEQ ID NO: 174);
the FN1 polypeptide having Genbank Accession Number NP_{—}997641.1 (SEQ ID NO: 176);
the FN1 polypeptide having Genbank Accession Number NP_{—}997643.1 (SEQ ID NO: 178); and
the FN1 polypeptide having Genbank Accession Number NP_{—}997647.1 (SEQ ID NO: 180).
